United States Patent Application Publication US 2015/0191722 A1 - sequence listing, part 5

SEQ ID NO: 155139 - DNA, 15 bp, Homo sapiens
ttgaagacaccagaa

SEQ ID NO: 155140 - DNA, 15 bp, Homo sapiens
tgaagacaccagaag

SEQ ID NO: 155141 - DNA, 15 bp, Homo sapiens
gaagacaccagaaga

SEQ ID NO: 155142 - DNA, 15 bp, Homo sapiens
aagacaccagaagaa

SEQ ID NO: 155143 - DNA, 15 bp, Homo sapiens
agacaccagaagaag

SEQ ID NO: 155144 - DNA, 15 bp, Homo sapiens
gacaccagaagaagg

SEQ ID NO: 155145 - DNA, 15 bp, Homo sapiens
acaccagaagaagga

SEQ ID NO: 155146 - DNA, 15 bp, Homo sapiens
caccagaagaaggag

SEQ ID NO: 155147 - DNA, 15 bp, Homo sapiens
accagaagaaggagc

SEQ ID NO: 155148 - DNA, 15 bp, Homo sapiens
ccagaagaaggagca

SEQ ID NO: 155149 - DNA, 15 bp, Homo sapiens
cagaagaaggagcat

SEQ ID NO: 155150 - DNA, 15 bp, Homo sapiens
agaagaaggagcatg

SEQ ID NO: 155151 - DNA, 15 bp, Homo sapiens
gaagaaggagcatgg

SEQ ID NO: 155152 - DNA, 15 bp, Homo sapiens
aagaaggagcatggc

SEQ ID NO: 155153 - DNA, 15 bp, Homo sapiens
agaaggagcatggca

SEQ ID NO: 155154 - DNA, 15 bp, Homo sapiens
gaaggagcatggcaa

SEQ ID NO: 155155 - DNA, 15 bp, Homo sapiens
aaggagcatggcaat

SEQ ID NO: 155156 - DNA, 15 bp, Homo sapiens
aggagcatggcaatg

SEQ ID NO: 155157 - DNA, 15 bp, Homo sapiens
ggagcatggcaatgc

SEQ ID NO: 155158 - DNA, 15 bp, Homo sapiens
gagcatggcaatgcc

SEQ ID NO: 155159 - DNA, 15 bp, Homo sapiens
agcatggcaatgccg

SEQ ID NO: 155160 - DNA, 15 bp, Homo sapiens
gcatggcaatgccga

SEQ ID NO: 155161 - DNA, 15 bp, Homo sapiens
catggcaatgccgaa

SEQ ID NO: 155162 - DNA, 15 bp, Homo sapiens
atggcaatgccgaaa

SEQ ID NO: 155163 - DNA, 15 bp, Homo sapiens
tggcaatgccgaaaa

SEQ ID NO: 155164 - DNA, 15 bp, Homo sapiens
ggcaatgccgaaaac

SEQ ID NO: 155165 - DNA, 15 bp, Homo sapiens
gcaatgccgaaaaca

SEQ ID NO: 155166 - DNA, 15 bp, Homo sapiens
caatgccgaaaacac

SEQ ID NO: 155167 - DNA, 15 bp, Homo sapiens
aatgccgaaaacacc

SEQ ID NO: 155168 - DNA, 15 bp, Homo sapiens
atgccgaaaacacct

SEQ ID NO: 155169 - DNA, 15 bp, Homo sapiens
tgccgaaaacaccta

SEQ ID NO: 155170 - DNA, 15 bp, Homo sapiens
gccgaaaacacctaa

SEQ ID NO: 155171 - DNA, 15 bp, Homo sapiens
ccgaaaacacctaag

SEQ ID NO: 155172 - DNA, 15 bp, Homo sapiens
cgaaaacacctaaga

SEQ ID NO: 155173 - DNA, 15 bp, Homo sapiens
gaaaacacctaagat

SEQ ID NO: 155174 - DNA, 15 bp, Homo sapiens
aaaacacctaagata

SEQ ID NO: 155175 - DNA, 15 bp, Homo sapiens
aaacacctaagataa

SEQ ID NO: 155176 - DNA, 15 bp, Homo sapiens
aacacctaagataat

SEQ ID NO: 155177 - DNA, 15 bp, Homo sapiens
acacctaagataata

SEQ ID NO: 155178 - DNA, 15 bp, Homo sapiens
cacctaagataatag

SEQ ID NO: 155179 - DNA, 15 bp, Homo sapiens
acctaagataatagg

SEQ ID NO: 155180 - DNA, 15 bp, Homo sapiens
cctaagataataggt

SEQ ID NO: 155181 - DNA, 15 bp, Homo sapiens
ctaagataataggtg

SEQ ID NO: 155182 - DNA, 15 bp, Homo sapiens
taagataataggtga

SEQ ID NO: 155183 - DNA, 15 bp, Homo sapiens
aagataataggtgac

SEQ ID NO: 155184 - DNA, 15 bp, Homo sapiens
agataataggtgacc

SEQ ID NO: 155185 - DNA, 15 bp, Homo sapiens
gataataggtgacct

SEQ ID NO: 155186 - DNA, 15 bp, Homo sapiens
ataataggtgacctt

SEQ ID NO: 155187 - DNA, 15 bp, Homo sapiens
taataggtgaccttc

SEQ ID NO: 155188 - DNA, 15 bp, Homo sapiens
aataggtgaccttca

SEQ ID NO: 155189 - DNA, 15 bp, Homo sapiens
ataggtgaccttcag

SEQ ID NO: 155190 - DNA, 15 bp, Homo sapiens
taggtgaccttcagt

SEQ ID NO: 155191 - DNA, 15 bp, Homo sapiens
aggtgaccttcagtg

SEQ ID NO: 155192 - DNA, 15 bp, Homo sapiens
ggtgaccttcagtgt

SEQ ID NO: 155193 - DNA, 15 bp, Homo sapiens
gtgaccttcagtgtt

SEQ ID NO: 155194 - DNA, 15 bp, Homo sapiens
tgaccttcagtgttg

SEQ ID NO: 155195 - DNA, 15 bp, Homo sapiens
gaccttcagtgttgg

SEQ ID NO: 155196 - DNA, 15 bp, Homo sapiens
accttcagtgttggc

SEQ ID NO: 155197 - DNA, 15 bp, Homo sapiens
ccttcagtgttggct

SEQ ID NO: 155198 - DNA, 15 bp, Homo sapiens
cttcagtgttggctt

SEQ ID NO: 155199 - DNA, 15 bp, Homo sapiens
ttcagtgttggcttc

SEQ ID NO: 155200 - DNA, 15 bp, Homo sapiens
tcagtgttggcttct

SEQ ID NO: 155201 - DNA, 15 bp, Homo sapiens
cagtgttggcttctt

SEQ ID NO: 155202 - DNA, 15 bp, Homo sapiens
agtgttggcttcttg

SEQ ID NO: 155203 - DNA, 15 bp, Homo sapiens
gtgttggcttcttgc

SEQ ID NO: 155204 - DNA, 15 bp, Homo sapiens
tgttggcttcttgca

SEQ ID NO: 155205 - DNA, 15 bp, Homo sapiens
gttggcttcttgcag

SEQ ID NO: 155206 - DNA, 15 bp, Homo sapiens
ttggcttcttgcaga

SEQ ID NO: 155207 - DNA, 15 bp, Homo sapiens
tggcttcttgcagaa

SEQ ID NO: 155208 - DNA, 15 bp, Homo sapiens
ggcttcttgcagaat

SEQ ID NO: 155209 - DNA, 15 bp, Homo sapiens
gcttcttgcagaatc

SEQ ID NO: 155210 - DNA, 15 bp, Homo sapiens
cttcttgcagaatcc

SEQ ID NO: 155211 - DNA, 15 bp, Homo sapiens
ttcttgcagaatcca

SEQ ID NO: 155212 - DNA, 15 bp, Homo sapiens
tcttgcagaatccag

SEQ ID NO: 155213 - DNA, 15 bp, Homo sapiens
cttgcagaatccaga

SEQ ID NO: 155214 - DNA, 15 bp, Homo sapiens
ttgcagaatccagag

SEQ ID NO: 155215 - DNA, 15 bp, Homo sapiens
tgcagaatccagaga

SEQ ID NO: 155216 - DNA, 15 bp, Homo sapiens
gcagaatccagagag

SEQ ID NO: 155217 - DNA, 15 bp, Homo sapiens
cagaatccagagaga

SEQ ID NO: 155218 - DNA, 15 bp, Homo sapiens
agaatccagagagac

SEQ ID NO: 155219 - DNA, 15 bp, Homo sapiens
gaatccagagagaca

SEQ ID NO: 155220 - DNA, 15 bp, Homo sapiens
aatccagagagacag

SEQ ID NO: 155221 - DNA, 15 bp, Homo sapiens
atccagagagacaga

SEQ ID NO: 155222 - DNA, 15 bp, Homo sapiens
tccagagagacagac

SEQ ID NO: 155223 - DNA, 15 bp, Homo sapiens
ccagagagacagact

SEQ ID NO: 155224 - DNA, 15 bp, Homo sapiens
cagagagacagactt

SEQ ID NO: 155225 - DNA, 15 bp, Homo sapiens
agagagacagacttg

SEQ ID NO: 155226 - DNA, 15 bp, Homo sapiens
gagagacagacttgc

SEQ ID NO: 155227 - DNA, 15 bp, Homo sapiens
agagacagacttgct

SEQ ID NO: 155228 - DNA, 15 bp, Homo sapiens
gagacagacttgctc

SEQ ID NO: 155229 - DNA, 15 bp, Homo sapiens
agacagacttgctca

SEQ ID NO: 155230 - DNA, 15 bp, Homo sapiens
gacagacttgctcag

SEQ ID NO: 155231 - DNA, 15 bp, Homo sapiens
acagacttgctcagt

SEQ ID NO: 155232 - DNA, 15 bp, Homo sapiens
cagacttgctcagtg

SEQ ID NO: 155233 - DNA, 15 bp, Homo sapiens
agacttgctcagtgg

SEQ ID NO: 155234 - DNA, 15 bp, Homo sapiens
gacttgctcagtggg

SEQ ID NO: 155235 - DNA, 15 bp, Homo sapiens
acttgctcagtggga

SEQ ID NO: 155236 - DNA, 15 bp, Homo sapiens
cttgctcagtgggat

SEQ ID NO: 155237 - DNA, 15 bp, Homo sapiens
ttgctcagtgggatg

SEQ ID NO: 155238 - DNA, 15 bp, Homo sapiens
tgctcagtgggatgg

SEQ ID NO: 155239 - DNA, 15 bp, Homo sapiens
gctcagtgggatgga

SEQ ID NO: 155240 - DNA, 15 bp, Homo sapiens
ctcagtgggatggat

SEQ ID NO: 155241 - DNA, 15 bp, Homo sapiens
tcagtgggatggatg

SEQ ID NO: 155242 - DNA, 15 bp, Homo sapiens
cagtgggatggatgg

SEQ ID NO: 155243 - DNA, 15 bp, Homo sapiens
agtgggatggatggc

SEQ ID NO: 155244 - DNA, 15 bp, Homo sapiens
gtgggatggatggca

SEQ ID NO: 155245 - DNA, 15 bp, Homo sapiens
tgggatggatggcaa

SEQ ID NO: 155246 - DNA, 15 bp, Homo sapiens
gggatggatggcaaa

SEQ ID NO: 155247 - DNA, 15 bp, Homo sapiens
ggatggatggcaaag

SEQ ID NO: 155248 - DNA, 15 bp, Homo sapiens
gatggatggcaaagg

SEQ ID NO: 155249 - DNA, 15 bp, Homo sapiens
atggatggcaaaggg

SEQ ID NO: 155250 - DNA, 15 bp, Homo sapiens
tggatggcaaagggt

SEQ ID NO: 155251 - DNA, 15 bp, Homo sapiens
ggatggcaaagggtc

SEQ ID NO: 155252 - DNA, 15 bp, Homo sapiens
gatggcaaagggtcc

SEQ ID NO: 155253 - DNA, 15 bp, Homo sapiens
atggcaaagggtcct

SEQ ID NO: 155254 - DNA, 15 bp, Homo sapiens
tggcaaagggtccta

SEQ ID NO: 155255 - DNA, 15 bp, Homo sapiens
ggcaaagggtcctac

SEQ ID NO: 155256 - DNA, 15 bp, Homo sapiens
gcaaagggtcctacc

SEQ ID NO: 155257 - DNA, 15 bp, Homo sapiens
caaagggtcctacca

SEQ ID NO: 155258 - DNA, 15 bp, Homo sapiens
aaagggtcctaccag

SEQ ID NO: 155259 - DNA, 15 bp, Homo sapiens
aagggtcctaccagg

SEQ ID NO: 155260 - DNA, 15 bp, Homo sapiens
agggtcctaccaggt

SEQ ID NO: 155261 - DNA, 15 bp, Homo sapiens
gggtcctaccaggtg

SEQ ID NO: 155262 - DNA, 15 bp, Homo sapiens
ggtcctaccaggtga

SEQ ID NO: 155263 - DNA, 15 bp, Homo sapiens
gtcctaccaggtgaa

SEQ ID NO: 155264 - DNA, 15 bp, Homo sapiens
tcctaccaggtgaaa

SEQ ID NO: 155265 - DNA, 15 bp, Homo sapiens
cctaccaggtgaaag

SEQ ID NO: 155266 - DNA, 15 bp, Homo sapiens
ctaccaggtgaaagg

SEQ ID NO: 155267 - DNA, 15 bp, Homo sapiens
taccaggtgaaaggc

SEQ ID NO: 155268 - DNA, 15 bp, Homo sapiens
accaggtgaaaggct

SEQ ID NO: 155269 - DNA, 15 bp, Homo sapiens
ccaggtgaaaggctg

SEQ ID NO: 155270 - DNA, 15 bp, Homo sapiens
caggtgaaaggctgg

SEQ ID NO: 155271 - DNA, 15 bp, Homo sapiens
aggtgaaaggctgga

SEQ ID NO: 155272 - DNA, 15 bp, Homo sapiens
ggtgaaaggctggaa

SEQ ID NO: 155273 - DNA, 15 bp, Homo sapiens
gtgaaaggctggaaa

SEQ ID NO: 155274 - DNA, 15 bp, Homo sapiens
tgaaaggctggaaac

SEQ ID NO: 155275 - DNA, 15 bp, Homo sapiens
gaaaggctggaaact

SEQ ID NO: 155276 - DNA, 15 bp, Homo sapiens
aaaggctggaaactt

SEQ ID NO: 155277 - DNA, 15 bp, Homo sapiens
aaggctggaaactta

SEQ ID NO: 155278 - DNA, 15 bp, Homo sapiens
aggctggaaacttac

SEQ ID NO: 155279 - DNA, 15 bp, Homo sapiens
ggctggaaacttaca

SEQ ID NO: 155280 - DNA, 15 bp, Homo sapiens
gctggaaacttacac

SEQ ID NO: 155281 - DNA, 15 bp, Homo sapiens
ctggaaacttacaca

SEQ ID NO: 155282 - DNA, 15 bp, Homo sapiens
tggaaacttacacag

SEQ ID NO: 155283 - DNA, 15 bp, Homo sapiens
ggaaacttacacagc

SEQ ID NO: 155284 - DNA, 15 bp, Homo sapiens
gaaacttacacagca

SEQ ID NO: 155285 - DNA, 15 bp, Homo sapiens
aaacttacacagcaa

SEQ ID NO: 155286 - DNA, 15 bp, Homo sapiens
aacttacacagcaac

SEQ ID NO: 155287 - DNA, 15 bp, Homo sapiens
acttacacagcaaca

SEQ ID NO: 155288 - DNA, 15 bp, Homo sapiens
cttacacagcaacag

SEQ ID NO: 155289 - DNA, 15 bp, Homo sapiens
ttacacagcaacagt

SEQ ID NO: 155290 - DNA, 15 bp, Homo sapiens
tacacagcaacagtt

SEQ ID NO: 155291 - DNA, 15 bp, Homo sapiens
acacagcaacagttt

SEQ ID NO: 155292 - DNA, 15 bp, Homo sapiens
cacagcaacagtttg

SEQ ID NO: 155293 - DNA, 15 bp, Homo sapiens
acagcaacagtttgt

SEQ ID NO: 155294 - DNA, 15 bp, Homo sapiens
cagcaacagtttgtg

SEQ ID NO: 155295 - DNA, 15 bp, Homo sapiens
agcaacagtttgtgg

SEQ ID NO: 155296 - DNA, 15 bp, Homo sapiens
gcaacagtttgtggc

SEQ ID NO: 155297 - DNA, 15 bp, Homo sapiens
caacagtttgtggcc

SEQ ID NO: 155298 - DNA, 15 bp, Homo sapiens
aacagtttgtggccc

SEQ ID NO: 155299 - DNA, 15 bp, Homo sapiens
acagtttgtggccct

SEQ ID NO: 155300 - DNA, 15 bp, Homo sapiens
cagtttgtggccctt

SEQ ID NO: 155301 - DNA, 15 bp, Homo sapiens
agtttgtggcccttt

SEQ ID NO: 155302 - DNA, 15 bp, Homo sapiens
gtttgtggccctttt

SEQ ID NO: 155303 - DNA, 15 bp, Homo sapiens
tttgtggcccttttg

SEQ ID NO: 155304 - DNA, 15 bp, Homo sapiens
ttgtggcccttttgt

SEQ ID NO: 155305 - DNA, 15 bp, Homo sapiens
tgtggcccttttgtg

SEQ ID NO: 155306 - DNA, 15 bp, Homo sapiens
gtggcccttttgtgg

SEQ ID NO: 155307 - DNA, 15 bp, Homo sapiens
tggcccttttgtgga

SEQ ID NO: 155308 - DNA, 15 bp, Homo sapiens
ggcccttttgtggaa

SEQ ID NO: 155309 - DNA, 15 bp, Homo sapiens
gcccttttgtggaag

SEQ ID NO: 155310 - DNA, 15 bp, Homo sapiens
cccttttgtggaaga

SEQ ID NO: 155311 - DNA, 15 bp, Homo sapiens
ccttttgtggaagag

SEQ ID NO: 155312 - DNA, 15 bp, Homo sapiens
cttttgtggaagaga

SEQ ID NO: 155313 - DNA, 15 bp, Homo sapiens
ttttgtggaagagac

SEQ ID NO: 155314 - DNA, 15 bp, Homo sapiens
tttgtggaagagact

SEQ ID NO: 155315 - DNA, 15 bp, Homo sapiens
ttgtggaagagactg

SEQ ID NO: 155316 - DNA, 15 bp, Homo sapiens
tgtggaagagactgc

SEQ ID NO: 155317 - DNA, 15 bp, Homo sapiens
gtggaagagactgct

SEQ ID NO: 155318 - DNA, 15 bp, Homo sapiens
tggaagagactgcta

SEQ ID NO: 155319 - DNA, 15 bp, Homo sapiens
ggaagagactgctaa

SEQ ID NO: 155320 - DNA, 15 bp, Homo sapiens
gaagagactgctaat

SEQ ID NO: 155321 - DNA, 15 bp, Homo sapiens
aagagactgctaatt

SEQ ID NO: 155322 - DNA, 15 bp, Homo sapiens
agagactgctaattg

SEQ ID NO: 155323 - DNA, 15 bp, Homo sapiens
gagactgctaattgc

SEQ ID NO: 155324 - DNA, 15 bp, Homo sapiens
agactgctaattgcc

SEQ ID NO: 155325 - DNA, 15 bp, Homo sapiens
gactgctaattgcca

SEQ ID NO: 155326 - DNA, 15 bp, Homo sapiens
actgctaattgccag

SEQ ID NO: 155327 - DNA, 15 bp, Homo sapiens
ctgctaattgccaga

SEQ ID NO: 155328 - DNA, 15 bp, Homo sapiens
tgctaattgccagac

SEQ ID NO: 155329 - DNA, 15 bp, Homo sapiens
gctaattgccagacg

SEQ ID NO: 155330 - DNA, 15 bp, Homo sapiens
ctaattgccagacgg

SEQ ID NO: 155331 - DNA, 15 bp, Homo sapiens
taattgccagacgga

SEQ ID NO: 155332 - DNA, 15 bp, Homo sapiens
aattgccagacggag

SEQ ID NO: 155333 - DNA, 15 bp, Homo sapiens
attgccagacggagt

SEQ ID NO: 155334 - DNA, 15 bp, Homo sapiens
ttgccagacggagtc

SEQ ID NO: 155335 - DNA, 15 bp, Homo sapiens
tgccagacggagtcg

SEQ ID NO: 155336 - DNA, 15 bp, Homo sapiens
gccagacggagtcgg

SEQ ID NO: 155337 - DNA, 15 bp, Homo sapiens
ccagacggagtcgga

SEQ ID NO: 155338 - DNA, 15 bp, Homo sapiens
cagacggagtcggaa

SEQ ID NO: 155339 - DNA, 15 bp, Homo sapiens
agacggagtcggaaa

SEQ ID NO: 155340 - DNA, 15 bp, Homo sapiens
gacggagtcggaaag

SEQ ID NO: 155341 - DNA, 15 bp, Homo sapiens
acggagtcggaaagg

SEQ ID NO: 155342 - DNA, 15 bp, Homo sapiens
cggagtcggaaagga

SEQ ID NO: 155343 - DNA, 15 bp, Homo sapiens
ggagtcggaaaggat

SEQ ID NO: 155344 - DNA, 15 bp, Homo sapiens
gagtcggaaaggatt

SEQ ID NO: 155345 - DNA, 15 bp, Homo sapiens
agtcggaaaggattt

SEQ ID NO: 155346 - DNA, 15 bp, Homo sapiens
gtcggaaaggatttt

SEQ ID NO: 155347 - DNA, 15 bp, Homo sapiens
tcggaaaggattttt

SEQ ID NO: 155348 - DNA, 15 bp, Homo sapiens
cggaaaggatttttt

SEQ ID NO: 155349 - DNA, 15 bp, Homo sapiens
ggaaaggattttttg

SEQ ID NO: 155350 - DNA, 15 bp, Homo sapiens
gaaaggattttttgc

SEQ ID NO: 155351 - DNA, 15 bp, Homo sapiens
aaaggattttttgct

SEQ ID NO: 155352 - DNA, 15 bp, Homo sapiens
aaggattttttgctc

SEQ ID NO: 155353 - DNA, 15 bp, Homo sapiens
aggattttttgctca

SEQ ID NO: 155354 - DNA, 15 bp, Homo sapiens
ggattttttgctcag

SEQ ID NO: 155355 - DNA, 15 bp, Homo sapiens
gattttttgctcagg

SEQ ID NO: 155356 - DNA, 15 bp, Homo sapiens
attttttgctcaggt

SEQ ID NO: 155357 - DNA, 15 bp, Homo sapiens
ttttttgctcaggtg

SEQ ID NO: 155358 - DNA, 15 bp, Homo sapiens
tttttgctcaggtga

SEQ ID NO: 155359 - DNA, 15 bp, Homo sapiens
ttttgctcaggtgag

SEQ ID NO: 155360 - DNA, 15 bp, Homo sapiens
tttgctcaggtgaga

SEQ ID NO: 155361 - DNA, 15 bp, Homo sapiens
ttgctcaggtgagac

SEQ ID NO: 155362 - DNA, 15 bp, Homo sapiens
tgctcaggtgagacg

SEQ ID NO: 155363 - DNA, 15 bp, Homo sapiens
gctcaggtgagacgt

SEQ ID NO: 155364 - DNA, 15 bp, Homo sapiens
ctcaggtgagacgtg

SEQ ID NO: 155365 - DNA, 15 bp, Homo sapiens
tcaggtgagacgtgc

SEQ ID NO: 155366 - DNA, 15 bp, Homo sapiens
caggtgagacgtgct

SEQ ID NO: 155367 - DNA, 15 bp, Homo sapiens
aggtgagacgtgctg

SEQ ID NO: 155368 - DNA, 15 bp, Homo sapiens
ggtgagacgtgctgt

SEQ ID NO: 155369 - DNA, 15 bp, Homo sapiens
gtgagacgtgctgtt

SEQ ID NO: 155370 - DNA, 15 bp, Homo sapiens
tgagacgtgctgttt

SEQ ID NO: 155371 - DNA, 15 bp, Homo sapiens
gagacgtgctgtttt

SEQ ID NO: 155372 - DNA, 15 bp, Homo sapiens
agacgtgctgttttc

SEQ ID NO: 155373 - DNA, 15 bp, Homo sapiens
gacgtgctgttttcg

SEQ ID NO: 155374 - DNA, 15 bp, Homo sapiens
acgtgctgttttcgc

SEQ ID NO: 155375 - DNA, 15 bp, Homo sapiens
cgtgctgttttcgcc

SEQ ID NO: 155376 - DNA, 15 bp, Homo sapiens
gtgctgttttcgcca

SEQ ID NO: 155377 - DNA, 15 bp, Homo sapiens
tgctgttttcgccag

SEQ ID NO: 155378 - DNA, 15 bp, Homo sapiens
gctgttttcgccaga

SEQ ID NO: 155379 - DNA, 15 bp, Homo sapiens
ctgttttcgccagag

SEQ ID NO: 155380 - DNA, 15 bp, Homo sapiens
tgttttcgccagaga

SEQ ID NO: 155381 - DNA, 15 bp, Homo sapiens
gttttcgccagagac

SEQ ID NO: 155382 - DNA, 15 bp, Homo sapiens
ttttcgccagagact

SEQ ID NO: 155383 - DNA, 15 bp, Homo sapiens
tttcgccagagactc

SEQ ID NO: 155384 - DNA, 15 bp, Homo sapiens
ttcgccagagactct

SEQ ID NO: 155385 - DNA, 15 bp, Homo sapiens
tcgccagagactctg

SEQ ID NO: 155386 - DNA, 15 bp, Homo sapiens
cgccagagactctgg

SEQ ID NO: 155387 - DNA, 15 bp, Homo sapiens
gccagagactctggc

SEQ ID NO: 155388 - DNA, 15 bp, Homo sapiens
ccagagactctggct

SEQ ID NO: 155389 - DNA, 15 bp, Homo sapiens
cagagactctggctt

SEQ ID NO: 155390 - DNA, 15 bp, Homo sapiens
agagactctggcttc

SEQ ID NO: 155391 - DNA, 15 bp, Homo sapiens
gagactctggcttca

SEQ ID NO: 155392 - DNA, 15 bp, Homo sapiens
agactctggcttcat

SEQ ID NO: 155393 - DNA, 15 bp, Homo sapiens
gactctggcttcatg

SEQ ID NO: 155394 - DNA, 15 bp, Homo sapiens
actctggcttcatgg

SEQ ID NO: 155395 - DNA, 15 bp, Homo sapiens
ctctggcttcatggg

SEQ ID NO: 155396 - DNA, 15 bp, Homo sapiens
tctggcttcatgggt

SEQ ID NO: 155397 - DNA, 15 bp, Homo sapiens
ctggcttcatgggtg

SEQ ID NO: 155398 - DNA, 15 bp, Homo sapiens
tggcttcatgggtgg

SEQ ID NO: 155399 - DNA, 15 bp, Homo sapiens
ggcttcatgggtggg

SEQ ID NO: 155400 - DNA, 15 bp, Homo sapiens
gcttcatgggtgggc

SEQ ID NO: 155401 - DNA, 15 bp, Homo sapiens
cttcatgggtgggct

SEQ ID NO: 155402 - DNA, 15 bp, Homo sapiens
ttcatgggtgggctg

SEQ ID NO: 155403 - DNA, 15 bp, Homo sapiens
tcatgggtgggctgc

SEQ ID NO: 155404 - DNA, 15 bp, Homo sapiens
catgggtgggctgca

SEQ ID NO: 155405 - DNA, 15 bp, Homo sapiens
atgggtgggctgcag

SEQ ID NO: 155406 - DNA, 15 bp, Homo sapiens
tgggtgggctgcagg

SEQ ID NO: 155407 - DNA, 15 bp, Homo sapiens
gggtgggctgcaggc

SEQ ID NO: 155408 - DNA, 15 bp, Homo sapiens
ggtgggctgcaggct

SEQ ID NO: 155409 - DNA, 15 bp, Homo sapiens
gtgggctgcaggctc

SEQ ID NO: 155410 - DNA, 15 bp, Homo sapiens
tgggctgcaggctct

SEQ ID NO: 155411 - DNA, 15 bp, Homo sapiens
gggctgcaggctctg

SEQ ID NO: 155412 - DNA, 15 bp, Homo sapiens
ggctgcaggctctgt

SEQ ID NO: 155413 - DNA, 15 bp, Homo sapiens
gctgcaggctctgtg

SEQ ID NO: 155414 - DNA, 15 bp, Homo sapiens
ctgcaggctctgtga

SEQ ID NO: 155415 - DNA, 15 bp, Homo sapiens
tgcaggctctgtgac

SEQ ID NO: 155416 - DNA, 15 bp, Homo sapiens
gcaggctctgtgacc

SEQ ID NO: 155417 - DNA, 15 bp, Homo sapiens
caggctctgtgacca

SEQ ID NO: 155418 - DNA, 15 bp, Homo sapiens
aggctctgtgaccag

SEQ ID NO: 155419 - DNA, 15 bp, Homo sapiens
ggctctgtgaccagt

SEQ ID NO: 155420 - DNA, 15 bp, Homo sapiens
gctctgtgaccagtg

SEQ ID NO: 155421 - DNA, 15 bp, Homo sapiens
ctctgtgaccagtga

SEQ ID NO: 155422 - DNA, 15 bp, Homo sapiens
tctgtgaccagtgaa

SEQ ID NO: 155423 - DNA, 15 bp, Homo sapiens
ctgtgaccagtgaag

SEQ ID NO: 155424 - DNA, 15 bp, Homo sapiens
tgtgaccagtgaagg

SEQ ID NO: 155425 - DNA, 15 bp, Homo sapiens
gtgaccagtgaaggc

SEQ ID NO: 155426 - DNA, 15 bp, Homo sapiens
tgaccagtgaaggca

SEQ ID NO: 155427 - DNA, 15 bp, Homo sapiens
gaccagtgaaggcag

SEQ ID NO: 155428 - DNA, 15 bp, Homo sapiens
accagtgaaggcagg

SEQ ID NO: 155429 - DNA, 15 bp, Homo sapiens
ccagtgaaggcagga

SEQ ID NO: 155430 - DNA, 15 bp, Homo sapiens
cagtgaaggcaggat

SEQ ID NO: 155431 - DNA, 15 bp, Homo sapiens
agtgaaggcaggata

SEQ ID NO: 155432 - DNA, 15 bp, Homo sapiens
gtgaaggcaggatag

SEQ ID NO: 155433 - DNA, 15 bp, Homo sapiens
tgaaggcaggatagc

SEQ ID NO: 155434 - DNA, 15 bp, Homo sapiens
gaaggcaggatagca

SEQ ID NO: 155435 - DNA, 15 bp, Homo sapiens
aaggcaggatagcat

SEQ ID NO: 155436 - DNA, 15 bp, Homo sapiens
aggcaggatagcatc

SEQ ID NO: 155437 - DNA, 15 bp, Homo sapiens
ggcaggatagcatcc

SEQ ID NO: 155438 - DNA, 15 bp, Homo sapiens
gcaggatagcatcct

SEQ ID NO: 155439 - DNA, 15 bp, Homo sapiens
caggatagcatcctg

SEQ ID NO: 155440 - DNA, 15 bp, Homo sapiens
aggatagcatcctgg

SEQ ID NO: 155441 - DNA, 15 bp, Homo sapiens
ggatagcatcctggt

SEQ ID NO: 155442 - DNA, 15 bp, Homo sapiens
gatagcatcctggtc

SEQ ID NO: 155443 - DNA, 15 bp, Homo sapiens
atagcatcctggtca

SEQ ID NO: 155444 - DNA, 15 bp, Homo sapiens
tagcatcctggtcaa

SEQ ID NO: 155445 - DNA, 15 bp, Homo sapiens
agcatcctggtcaag

SEQ ID NO: 155446 - DNA, 15 bp, Homo sapiens
gcatcctggtcaaga

SEQ ID NO: 155447 - DNA, 15 bp, Homo sapiens
catcctggtcaagat

SEQ ID NO: 155448 - DNA, 15 bp, Homo sapiens
atcctggtcaagata

SEQ ID NO: 155449 - DNA, 15 bp, Homo sapiens
tcctggtcaagatat

SEQ ID NO: 155450 - DNA, 15 bp, Homo sapiens
cctggtcaagatatg

SEQ ID NO: 155451 - DNA, 15 bp, Homo sapiens
ctggtcaagatatgg

SEQ ID NO: 155452 - DNA, 15 bp, Homo sapiens
tggtcaagatatgga

SEQ ID NO: 155453 - DNA, 15 bp, Homo sapiens
ggtcaagatatggat

SEQ ID NO: 155454 - DNA, 15 bp, Homo sapiens
gtcaagatatggatg

SEQ ID NO: 155455 - DNA, 15 bp, Homo sapiens
tcaagatatggatgc

SEQ ID NO: 155456 - DNA, 15 bp, Homo sapiens
caagatatggatgcc

SEQ ID NO: 155457 - DNA, 15 bp, Homo sapiens
aagatatggatgccg

SEQ ID NO: 155458 - DNA, 15 bp, Homo sapiens
agatatggatgccgg

SEQ ID NO: 155459 - DNA, 15 bp, Homo sapiens
gatatggatgccgga

SEQ ID NO: 155460 - DNA, 15 bp, Homo sapiens
atatggatgccggag

SEQ ID NO: 155461 - DNA, 15 bp, Homo sapiens
tatggatgccggagc

SEQ ID NO: 155462 - DNA, 15 bp, Homo sapiens
atggatgccggagcc

SEQ ID NO: 155463 - DNA, 15 bp, Homo sapiens
tggatgccggagcca

SEQ ID NO: 155464 - DNA, 15 bp, Homo sapiens
ggatgccggagccag

SEQ ID NO: 155465 - DNA, 15 bp, Homo sapiens
gatgccggagccaga

SEQ ID NO: 155466 - DNA, 15 bp, Homo sapiens
atgccggagccagat

SEQ ID NO: 155467 - DNA, 15 bp, Homo sapiens
tgccggagccagatt

SEQ ID NO: 155468 - DNA, 15 bp, Homo sapiens
gccggagccagattt

SEQ ID NO: 155469 - DNA, 15 bp, Homo sapiens
ccggagccagattta

SEQ ID NO: 155470 - DNA, 15 bp, Homo sapiens
cggagccagatttat

SEQ ID NO: 155471 - DNA, 15 bp, Homo sapiens
ggagccagatttatc

SEQ ID NO: 155472 - DNA, 15 bp, Homo sapiens
gagccagatttatct

SEQ ID NO: 155473 - DNA, 15 bp, Homo sapiens
agccagatttatctg

SEQ ID NO: 155474 - DNA, 15 bp, Homo sapiens
gccagatttatctgt

SEQ ID NO: 155475 - DNA, 15 bp, Homo sapiens
ccagatttatctgta

SEQ ID NO: 155476 - DNA, 15 bp, Homo sapiens
cagatttatctgtat

SEQ ID NO: 155477 - DNA, 15 bp, Homo sapiens
agatttatctgtatt

SEQ ID NO: 155478 - DNA, 15 bp, Homo sapiens
gatttatctgtattt

SEQ ID NO: 155479 - DNA, 15 bp, Homo sapiens
atttatctgtatttc

SEQ ID NO: 155480 - DNA, 15 bp, Homo sapiens
tttatctgtatttca

SEQ ID NO: 155481 - DNA, 15 bp, Homo sapiens
ttatctgtatttcaa

SEQ ID NO: 155482 - DNA, 15 bp, Homo sapiens
tatctgtatttcaat

SEQ ID NO: 155483 - DNA, 15 bp, Homo sapiens
atctgtatttcaatc

SEQ ID NO: 155484 - DNA, 15 bp, Homo sapiens
tctgtatttcaatcc

SEQ ID NO: 155485 - DNA, 15 bp, Homo sapiens
ctgtatttcaatccc

SEQ ID NO: 155486 - DNA, 15 bp, Homo sapiens
tgtatttcaatccca

SEQ ID NO: 155487 - DNA, 15 bp, Homo sapiens
gtatttcaatcccag

SEQ ID NO: 155488 - DNA, 15 bp, Homo sapiens
tatttcaatcccagt

SEQ ID NO: 155489 - DNA, 15 bp, Homo sapiens
atttcaatcccagtt

SEQ ID NO: 155490 - DNA, 15 bp, Homo sapiens
tttcaatcccagttc

SEQ ID NO: 155491 - DNA, 15 bp, Homo sapiens
ttcaatcccagttct

SEQ ID NO: 155492 - DNA, 15 bp, Homo sapiens
tcaatcccagttcta

SEQ ID NO: 155493 - DNA, 15 bp, Homo sapiens
caatcccagttctat

SEQ ID NO: 155494 - DNA, 15 bp, Homo sapiens
aatcccagttctatt

SEQ ID NO: 155495 - DNA, 15 bp, Homo sapiens
atcccagttctattc

SEQ ID NO: 155496 - DNA, 15 bp, Homo sapiens
tcccagttctattcc

SEQ ID NO: 155497 - DNA, 15 bp, Homo sapiens
cccagttctattcct

SEQ ID NO: 155498 - DNA, 15 bp, Homo sapiens
ccagttctattcctt

SEQ ID NO: 155499 - DNA, 15 bp, Homo sapiens
cagttctattccttg

SEQ ID NO: 155500 - DNA, 15 bp, Homo sapiens
agttctattccttgc

SEQ ID NO: 155501 - DNA, 15 bp, Homo sapiens
gttctattccttgcc

SEQ ID NO: 155502 - DNA, 15 bp, Homo sapiens
ttctattccttgcca

SEQ ID NO: 155503 - DNA, 15 bp, Homo sapiens
tctattccttgccag

SEQ ID NO: 155504 - DNA, 15 bp, Homo sapiens
ctattccttgccagt

SEQ ID NO: 155505 - DNA, 15 bp, Homo sapiens
tattccttgccagtt

SEQ ID NO: 155506 - DNA, 15 bp, Homo sapiens
attccttgccagttg

SEQ ID NO: 155507 - DNA, 15 bp, Homo sapiens
ttccttgccagttgt

SEQ ID NO: 155508 - DNA, 15 bp, Homo sapiens
tccttgccagttgtg

SEQ ID NO: 155509 - DNA, 15 bp, Homo sapiens
ccttgccagttgtgt

SEQ ID NO: 155510 - DNA, 15 bp, Homo sapiens
cttgccagttgtgta

SEQ ID NO: 155511 - DNA, 15 bp, Homo sapiens
ttgccagttgtgtat

SEQ ID NO: 155512 - DNA, 15 bp, Homo sapiens
tgccagttgtgtatc

SEQ ID NO: 155513 - DNA, 15 bp, Homo sapiens
gccagttgtgtatcc

SEQ ID NO: 155514 - DNA, 15 bp, Homo sapiens
ccagttgtgtatccg

SEQ ID NO: 155515 - DNA, 15 bp, Homo sapiens
cagttgtgtatccgc

SEQ ID NO: 155516 - DNA, 15 bp, Homo sapiens
agttgtgtatccgct

SEQ ID NO: 155517 - DNA, 15 bp, Homo sapiens
gttgtgtatccgctg

SEQ ID NO: 155518 - DNA, 15 bp, Homo sapiens
ttgtgtatccgctgg

SEQ ID NO: 155519 - DNA, 15 bp, Homo sapiens
tgtgtatccgctggc

SEQ ID NO: 155520 - DNA, 15 bp, Homo sapiens
gtgtatccgctggca

SEQ ID NO: 155521 - DNA, 15 bp, Homo sapiens
tgtatccgctggcaa

SEQ ID NO: 155522 - DNA, 15 bp, Homo sapiens
gtatccgctggcaag

SEQ ID NO: 155523 - DNA, 15 bp, Homo sapiens
tatccgctggcaagt

SEQ ID NO: 155524 - DNA, 15 bp, Homo sapiens
atccgctggcaagtt

SEQ ID NO: 155525 - DNA, 15 bp, Homo sapiens
tccgctggcaagtta

SEQ ID NO: 155526 - DNA, 15 bp, Homo sapiens
ccgctggcaagttac

SEQ ID NO: 155527 - DNA, 15 bp, Homo sapiens
cgctggcaagttact

SEQ ID NO: 155528 - DNA, 15 bp, Homo sapiens
gctggcaagttactt

SEQ ID NO: 155529 - DNA, 15 bp, Homo sapiens
ctggcaagttacttc

SEQ ID NO: 155530 - DNA, 15 bp, Homo sapiens
tggcaagttacttct

SEQ ID NO: 155531 - DNA, 15 bp, Homo sapiens
ggcaagttacttctc

SEQ ID NO: 155532 - DNA, 15 bp, Homo sapiens
gcaagttacttctct

SEQ ID NO: 155533 - DNA, 15 bp, Homo sapiens
caagttacttctcta

SEQ ID NO: 155534 - DNA, 15 bp, Homo sapiens
aagttacttctctat

SEQ ID NO: 155535 - DNA, 15 bp, Homo sapiens
agttacttctctatg

SEQ ID NO: 155536 - DNA, 15 bp, Homo sapiens
gttacttctctatgc

SEQ ID NO: 155537 - DNA, 15 bp, Homo sapiens
ttacttctctatgcc

SEQ ID NO: 155538 - DNA, 15 bp, Homo sapiens
tacttctctatgcct

SEQ ID NO: 155539 - DNA, 15 bp, Homo sapiens
acttctctatgcctc

SEQ ID NO: 155540 - DNA, 15 bp, Homo sapiens
cttctctatgcctca

SEQ ID NO: 155541 - DNA, 15 bp, Homo sapiens
ttctctatgcctcaa

SEQ ID NO: 155542 - DNA, 15 bp, Homo sapiens
tctctatgcctcaat

SEQ ID NO: 155543 - DNA, 15 bp, Homo sapiens
ctctatgcctcaatc

SEQ ID NO: 155544 - DNA, 15 bp, Homo sapiens
tctatgcctcaatct

SEQ ID NO: 155545 - DNA, 15 bp, Homo sapiens
ctatgcctcaatctc

SEQ ID NO: 155546 - DNA, 15 bp, Homo sapiens
tatgcctcaatctcc

SEQ ID NO: 155547 - DNA, 15 bp, Homo sapiens
atgcctcaatctcct

SEQ ID NO: 155548 - DNA, 15 bp, Homo sapiens
tgcctcaatctcctc

SEQ ID NO: 155549 - DNA, 15 bp, Homo sapiens
gcctcaatctcctca

SEQ ID NO: 155550 - DNA, 15 bp, Homo sapiens
cctcaatctcctcat

SEQ ID NO: 155551 - DNA, 15 bp, Homo sapiens
ctcaatctcctcatc

SEQ ID NO: 155552 - DNA, 15 bp, Homo sapiens
tcaatctcctcatct

SEQ ID NO: 155553 - DNA, 15 bp, Homo sapiens
caatctcctcatctg

SEQ ID NO: 155554 - DNA, 15 bp, Homo sapiens
aatctcctcatctgt

SEQ ID NO: 155555 - DNA, 15 bp, Homo sapiens
atctcctcatctgta

SEQ ID NO: 155556 - DNA, 15 bp, Homo sapiens
tctcctcatctgtaa

SEQ ID NO: 155557 - DNA, 15 bp, Homo sapiens
ctcctcatctgtaaa

SEQ ID NO: 155558 - DNA, 15 bp, Homo sapiens
tcctcatctgtaaaa

SEQ ID NO: 155559 - DNA, 15 bp, Homo sapiens
cctcatctgtaaaat

SEQ ID NO: 155560 - DNA, 15 bp, Homo sapiens
catctgtaaaatggg

SEQ ID NO: 155561 - DNA, 15 bp, Homo sapiens
atctgtaaaatgggg

SEQ ID NO: 155562 - DNA, 15 bp, Homo sapiens
tctgtaaaatgggga

SEQ ID NO: 155563 - DNA, 15 bp, Homo sapiens
ctgtaaaatggggat

SEQ ID NO: 155564 - DNA, 15 bp, Homo sapiens
tgtaaaatggggata

SEQ ID NO: 155565 - DNA, 15 bp, Homo sapiens
gtaaaatggggataa

SEQ ID NO: 155566 - DNA, 15 bp, Homo sapiens
taaaatggggataat

SEQ ID NO: 155567 - DNA, 15 bp, Homo sapiens
aaaatggggataata

SEQ ID NO: 155568 - DNA, 15 bp, Homo sapiens
aaatggggataataa

SEQ ID NO: 155569 - DNA, 15 bp, Homo sapiens
aatggggataataat

SEQ ID NO: 155570 - DNA, 15 bp, Homo sapiens
atggggataataata

SEQ ID NO: 155571 - DNA, 15 bp, Homo sapiens
tggggataataatat

SEQ ID NO: 155572 - DNA, 15 bp, Homo sapiens
ggggataataatatt

SEQ ID NO: 155573 - DNA, 15 bp, Homo sapiens
gggataataatatta

SEQ ID NO: 155574 - DNA, 15 bp, Homo sapiens
ggataataatattac

SEQ ID NO: 155575 - DNA, 15 bp, Homo sapiens
gataataatattacc

SEQ ID NO: 155576 - DNA, 15 bp, Homo sapiens
ataataatattacct

SEQ ID NO: 155577 - DNA, 15 bp, Homo sapiens
taataatattacctg

SEQ ID NO: 155578 - DNA, 15 bp, Homo sapiens
aataatattacctgc

SEQ ID NO: 155579 - DNA, 15 bp, Homo sapiens
ataatattacctgca

SEQ ID NO: 155580 - DNA, 15 bp, Homo sapiens
taatattacctgcaa

SEQ ID NO: 155581 - DNA, 15 bp, Homo sapiens
aatattacctgcaat

SEQ ID NO: 155582 - DNA, 15 bp, Homo sapiens
atattacctgcaata

SEQ ID NO: 155583 - DNA, 15 bp, Homo sapiens
tattacctgcaatac

SEQ ID NO: 155584 - DNA, 15 bp, Homo sapiens
attacctgcaataca

SEQ ID NO: 155585 - DNA, 15 bp, Homo sapiens
ttacctgcaatacag

SEQ ID NO: 155586 - DNA, 15 bp, Homo sapiens
tacctgcaatacagg

SEQ ID NO: 155587 - DNA, 15 bp, Homo sapiens
acctgcaatacaggg

SEQ ID NO: 155588 - DNA, 15 bp, Homo sapiens
cctgcaatacagggt

SEQ ID NO: 155589 - DNA, 15 bp, Homo sapiens
ctgcaatacagggtt

SEQ ID NO: 155590 - DNA, 15 bp, Homo sapiens
tgcaatacagggttg

SEQ ID NO: 155591 - DNA, 15 bp, Homo sapiens
gcaatacagggttgt

SEQ ID NO: 155592 - DNA, 15 bp, Homo sapiens
caatacagggttgtt

SEQ ID NO: 155593 - DNA, 15 bp, Homo sapiens
aatacagggttgtta

SEQ ID NO: 155594 - DNA, 15 bp, Homo sapiens
atacagggttgttac

SEQ ID NO: 155595 - DNA, 15 bp, Homo sapiens
tacagggttgttacg

SEQ ID NO: 155596 - DNA, 15 bp, Homo sapiens
acagggttgttacga

SEQ ID NO: 155597 - DNA, 15 bp, Homo sapiens
cagggttgttacgaa

SEQ ID NO: 155598 - DNA, 15 bp, Homo sapiens
agggttgttacgaaa

SEQ ID NO: 155599 - DNA, 15 bp, Homo sapiens
gggttgttacgaaaa

SEQ ID NO: 155600 - DNA, 15 bp, Homo sapiens
ggttgttacgaaaat

SEQ ID NO: 155601 - DNA, 15 bp, Homo sapiens
gttgttacgaaaata

SEQ ID NO: 155602 - DNA, 15 bp, Homo sapiens
ttgttacgaaaataa

SEQ ID NO: 155603 - DNA, 15 bp, Homo sapiens
tgttacgaaaataaa

SEQ ID NO: 155604 - DNA, 15 bp, Homo sapiens
gttacgaaaataaaa

SEQ ID NO: 155605 - DNA, 15 bp, Homo sapiens
ttacgaaaataaaaa

SEQ ID NO: 155606 - DNA, 15 bp, Homo sapiens
tacgaaaataaaaat

SEQ ID NO: 155607 - DNA, 15 bp, Homo sapiens
acgaaaataaaaatg

SEQ ID NO: 155608 - DNA, 15 bp, Homo sapiens
cgaaaataaaaatga

SEQ ID NO: 155609 - DNA, 15 bp, Homo sapiens
gaaaataaaaatgaa

SEQ ID NO: 155610 - DNA, 15 bp, Homo sapiens
aaaataaaaatgaat

SEQ ID NO: 155611 - DNA, 15 bp, Homo sapiens
aaataaaaatgaata

SEQ ID NO: 155612 - DNA, 15 bp, Homo sapiens
aataaaaatgaatag

SEQ ID NO: 155613 - DNA, 15 bp, Homo sapiens
ataaaaatgaatagg

SEQ ID NO: 155614 - DNA, 15 bp, Homo sapiens
taaaaatgaataggt

SEQ ID NO: 155615 - DNA, 15 bp, Homo sapiens
aaaaatgaataggtg

SEQ ID NO: 155616 - DNA, 15 bp, Homo sapiens
aaaatgaataggtgc

SEQ ID NO: 155617 - DNA, 15 bp, Homo sapiens
aaatgaataggtgct

SEQ ID NO: 155618 - DNA, 15 bp, Homo sapiens
aatgaataggtgctt

SEQ ID NO: 155619 - DNA, 15 bp, Homo sapiens
atgaataggtgctta

SEQ ID NO: 155620 - DNA, 15 bp, Homo sapiens
tgaataggtgcttag

SEQ ID NO: 155621 - DNA, 15 bp, Homo sapiens
gaataggtgcttaga

SEQ ID NO: 155622 - DNA, 15 bp, Homo sapiens
aataggtgcttagaa

SEQ ID NO: 155623 - DNA, 15 bp, Homo sapiens
ataggtgcttagaat

SEQ ID NO: 155624 - DNA, 15 bp, Homo sapiens
taggtgcttagaatg

SEQ ID NO: 155625 - DNA, 15 bp, Homo sapiens
aggtgcttagaatgg

SEQ ID NO: 155626 - DNA, 15 bp, Homo sapiens
ggtgcttagaatggg

SEQ ID NO: 155627 - DNA, 15 bp, Homo sapiens
gtgcttagaatgggg

SEQ ID NO: 155628 - DNA, 15 bp, Homo sapiens
tgcttagaatggggc

SEQ ID NO: 155629 - DNA, 15 bp, Homo sapiens
gcttagaatggggcc

SEQ ID NO: 155630 - DNA, 15 bp, Homo sapiens
cttagaatggggcct

SEQ ID NO: 155631 - DNA, 15 bp, Homo sapiens
ttagaatggggcctg

SEQ ID NO: 155632 - DNA, 15 bp, Homo sapiens
tagaatggggcctga

SEQ ID NO: 155633 - DNA, 15 bp, Homo sapiens
agaatggggcctgac

SEQ ID NO: 155634 - DNA, 15 bp, Homo sapiens
gaatggggcctgaca

SEQ ID NO: 155635 - DNA, 15 bp, Homo sapiens
aatggggcctgacat

SEQ ID NO: 155636 - DNA, 15 bp, Homo sapiens
atggggcctgacatt

SEQ ID NO: 155637 - DNA, 15 bp, Homo sapiens
tggggcctgacatta

SEQ ID NO: 155638 - DNA, 15 bp, Homo sapiens
ggggcctgacattag

SEQ ID NO: 155639 - DNA, 15 bp, Homo sapiens
gggcctgacattagt

SEQ ID NO: 155640 - DNA, 15 bp, Homo sapiens
ggcctgacattagta

SEQ ID NO: 155641 - DNA, 15 bp, Homo sapiens
gcctgacattagtaa

SEQ ID NO: 155642 - DNA, 15 bp, Homo sapiens
cctgacattagtaag

SEQ ID NO: 155643 - DNA, 15 bp, Homo sapiens
ctgacattagtaagt

SEQ ID NO: 155644 - DNA, 15 bp, Homo sapiens
tgacattagtaagtg

SEQ ID NO: 155645 - DNA, 15 bp, Homo sapiens
gacattagtaagtgc

SEQ ID NO: 155646 - DNA, 15 bp, Homo sapiens
acattagtaagtgct

SEQ ID NO: 155647 - DNA, 15 bp, Homo sapiens
cattagtaagtgctt

SEQ ID NO: 155648 - DNA, 15 bp, Homo sapiens
attagtaagtgctta

SEQ ID NO: 155649 - DNA, 15 bp, Homo sapiens
ttagtaagtgcttag

SEQ ID NO: 155650 - DNA, 15 bp, Homo sapiens
tagtaagtgcttagt

SEQ ID NO: 155651 - DNA, 15 bp, Homo sapiens
agtaagtgcttagtt

SEQ ID NO: 155652 - DNA, 15 bp, Homo sapiens
gtaagtgcttagttt

SEQ ID NO: 155653 - DNA, 15 bp, Homo sapiens
taagtgcttagtttt

SEQ ID NO: 155654 - DNA, 15 bp, Homo sapiens
aagtgcttagttttg

SEQ ID NO: 155655 - DNA, 15 bp, Homo sapiens
agtgcttagttttgt

SEQ ID NO: 155656 - DNA, 15 bp, Homo sapiens
gtgcttagttttgtg

SEQ ID NO: 155657 - DNA, 15 bp, Homo sapiens
tgcttagttttgtgt

SEQ ID NO: 155658 - DNA, 15 bp, Homo sapiens
gcttagttttgtgtg

SEQ ID NO: 155659 - DNA, 15 bp, Homo sapiens
cttagttttgtgtgt

SEQ ID NO: 155660 - DNA, 15 bp, Homo sapiens
ttagttttgtgtgtg

SEQ ID NO: 155661 - DNA, 15 bp, Homo sapiens
tagttttgtgtgtgt

SEQ ID NO: 155662 - DNA, 15 bp, Homo sapiens
agttttgtgtgtgta

SEQ ID NO: 155663 - DNA, 15 bp, Homo sapiens
gttttgtgtgtgtat

SEQ ID NO: 155664 - DNA, 15 bp, Homo sapiens
ttttgtgtgtgtata

SEQ ID NO: 155665 - DNA, 15 bp, Homo sapiens
tttgtgtgtgtatat

SEQ ID NO: 155666 - DNA, 15 bp, Homo sapiens
ttgtgtgtgtatatg

SEQ ID NO: 155667 - DNA, 15 bp, Homo sapiens
tgtgtgtgtatatgt

SEQ ID NO: 155668 - DNA, 15 bp, Homo sapiens
gtgtgtgtatatgtt

SEQ ID NO: 155669 - DNA, 15 bp, Homo sapiens
tgtgtgtatatgtta

SEQ ID NO: 155670 - DNA, 15 bp, Homo sapiens
gtgtgtatatgttat

SEQ ID NO: 155671 - DNA, 15 bp, Homo sapiens
tgtgtatatgttatt

SEQ ID NO: 155672 - DNA, 15 bp, Homo sapiens
gtgtatatgttattt

SEQ ID NO: 155673 - DNA, 15 bp, Homo sapiens
tgtatatgttatttt

SEQ ID NO: 155674 - DNA, 15 bp, Homo sapiens
gtatatgttattttt

SEQ ID NO: 155675 - DNA, 15 bp, Homo sapiens
tatatgttattttta

SEQ ID NO: 155676 - DNA, 15 bp, Homo sapiens
atatgttatttttat

SEQ ID NO: 155677 - DNA, 15 bp, Homo sapiens
tatgttatttttatt

SEQ ID NO: 155678 - DNA, 15 bp, Homo sapiens
atgttatttttattt

SEQ ID NO: 155679 - DNA, 15 bp, Homo sapiens
tgttatttttatttt

SEQ ID NO: 155680 - DNA, 15 bp, Homo sapiens
gttatttttattttg

SEQ ID NO: 155681 - DNA, 15 bp, Homo sapiens
ttatttttattttgg

SEQ ID NO: 155682 - DNA, 15 bp, Homo sapiens
tatttttattttgga

SEQ ID NO: 155683 - DNA, 15 bp, Homo sapiens
atttttattttggag

SEQ ID NO: 155684 - DNA, 15 bp, Homo sapiens
tttttattttggagg

SEQ ID NO: 155685 - DNA, 15 bp, Homo sapiens
ttttattttggagga

SEQ ID NO: 155686 - DNA, 15 bp, Homo sapiens
tttattttggaggag

SEQ ID NO: 155687 - DNA, 15 bp, Homo sapiens
ttattttggaggaga

SEQ ID NO: 155688 - DNA, 15 bp, Homo sapiens
tattttggaggagaa

SEQ ID NO: 155689 - DNA, 15 bp, Homo sapiens
attttggaggagaac

SEQ ID NO: 155690 - DNA, 15 bp, Homo sapiens
ttttggaggagaaca

SEQ ID NO: 155691 - DNA, 15 bp, Homo sapiens
tttggaggagaacat

SEQ ID NO: 155692 - DNA, 15 bp, Homo sapiens
ttggaggagaacata

SEQ ID NO: 155693 - DNA, 15 bp, Homo sapiens
tggaggagaacataa

SEQ ID NO: 155694 - DNA, 15 bp, Homo sapiens
ggaggagaacataaa

SEQ ID NO: 155695 - DNA, 15 bp, Homo sapiens
gaggagaacataaaa

SEQ ID NO: 155696 - DNA, 15 bp, Homo sapiens
aggagaacataaaaa

SEQ ID NO: 155697 - DNA, 15 bp, Homo sapiens
ggagaacataaaaag

SEQ ID NO: 155698 - DNA, 15 bp, Homo sapiens
gagaacataaaaagg

SEQ ID NO: 155699 - DNA, 15 bp, Homo sapiens
agaacataaaaagga

SEQ ID NO: 155700 - DNA, 15 bp, Homo sapiens
gaacataaaaaggac

SEQ ID NO: 155701 - DNA, 15 bp, Homo sapiens
aacataaaaaggaca

SEQ ID NO: 155702 - DNA, 15 bp, Homo sapiens
acataaaaaggacaa

SEQ ID NO: 155703 - DNA, 15 bp, Homo sapiens
cataaaaaggacaaa

SEQ ID NO: 155704 - DNA, 15 bp, Homo sapiens
ataaaaaggacaaag

SEQ ID NO: 155705 - DNA, 15 bp, Homo sapiens
taaaaaggacaaagt

SEQ ID NO: 155706 - DNA, 15 bp, Homo sapiens
aaaaaggacaaagtg

SEQ ID NO: 155707 - DNA, 15 bp, Homo sapiens
aaaaggacaaagtgt

SEQ ID NO: 155708 - DNA, 15 bp, Homo sapiens
aaaggacaaagtgta

SEQ ID NO: 155709 - DNA, 15 bp, Homo sapiens
aaggacaaagtgtag

SEQ ID NO: 155710 - DNA, 15 bp, Homo sapiens
aggacaaagtgtaga

SEQ ID NO: 155711 - DNA, 15 bp, Homo sapiens
ggacaaagtgtagaa

SEQ ID NO: 155712 - DNA, 15 bp, Homo sapiens
gacaaagtgtagaaa

SEQ ID NO: 155713 - DNA, 15 bp, Homo sapiens
acaaagtgtagaaaa

SEQ ID NO: 155714 - DNA, 15 bp, Homo sapiens
caaagtgtagaaaaa

SEQ ID NO: 155715 - DNA, 15 bp, Homo sapiens
aaagtgtagaaaaac

SEQ ID NO: 155716 - DNA, 15 bp, Homo sapiens
aagtgtagaaaaact

SEQ ID NO: 155717 - DNA, 15 bp, Homo sapiens
agtgtagaaaaactg

SEQ ID NO: 155718 - DNA, 15 bp, Homo sapiens
gtgtagaaaaactgg

SEQ ID NO: 155719 - DNA, 15 bp, Homo sapiens
tgtagaaaaactggt

SEQ ID NO: 155720 - DNA, 15 bp, Homo sapiens
gtagaaaaactggtt

SEQ ID NO: 155721 - DNA, 15 bp, Homo sapiens
tagaaaaactggttg

SEQ ID NO: 155722 - DNA, 15 bp, Homo sapiens
agaaaaactggttgg

SEQ ID NO: 155723 - DNA, 15 bp, Homo sapiens
gaaaaactggttggg

SEQ ID NO: 155724 - DNA, 15 bp, Homo sapiens
aaaaactggttgggt

SEQ ID NO: 155725 - DNA, 15 bp, Homo sapiens
aaaactggttgggtg

SEQ ID NO: 155726 - DNA, 15 bp, Homo sapiens
aaactggttgggtgt

SEQ ID NO: 155727 - DNA, 15 bp, Homo sapiens
aactggttgggtgta

SEQ ID NO: 155728 - DNA, 15 bp, Homo sapiens
actggttgggtgtat

SEQ ID NO: 155729 - DNA, 15 bp, Homo sapiens
ctggttgggtgtatt

SEQ ID NO: 155730 - DNA, 15 bp, Homo sapiens
tggttgggtgtattc

SEQ ID NO: 155731 - DNA, 15 bp, Homo sapiens
ggttgggtgtattca

SEQ ID NO: 155732 - DNA, 15 bp, Homo sapiens
gttgggtgtattcag

SEQ ID NO: 155733 - DNA, 15 bp, Homo sapiens
ttgggtgtattcagc

SEQ ID NO: 155734 - DNA, 15 bp, Homo sapiens
tgggtgtattcagct

SEQ ID NO: 155735 - DNA, 15 bp, Homo sapiens
gggtgtattcagctg

SEQ ID NO: 155736 - DNA, 15 bp, Homo sapiens
ggtgtattcagctgt

SEQ ID NO: 155737 - DNA, 15 bp, Homo sapiens
gtgtattcagctgtc

SEQ ID NO: 155738 - DNA, 15 bp, Homo sapiens
tgtattcagctgtca

SEQ ID NO: 155739 - DNA, 15 bp, Homo sapiens
gtattcagctgtcat

SEQ ID NO: 155740 - DNA, 15 bp, Homo sapiens
tattcagctgtcata

SEQ ID NO: 155741 - DNA, 15 bp, Homo sapiens
attcagctgtcataa

SEQ ID NO: 155742 - DNA, 15 bp, Homo sapiens
ttcagctgtcataac

SEQ ID NO: 155743 - DNA, 15 bp, Homo sapiens
tcagctgtcataaca

SEQ ID NO: 155744 - DNA, 15 bp, Homo sapiens
cagctgtcataacat

SEQ ID NO: 155745 - DNA, 15 bp, Homo sapiens
agctgtcataacatg

SEQ ID NO: 155746 - DNA, 15 bp, Homo sapiens
gctgtcataacatga

SEQ ID NO: 155747 - DNA, 15 bp, Homo sapiens
ctgtcataacatgag

SEQ ID NO: 155748 - DNA, 15 bp, Homo sapiens
tgtcataacatgaga

SEQ ID NO: 155749 - DNA, 15 bp, Homo sapiens
gtcataacatgagag

SEQ ID NO: 155750 - DNA, 15 bp, Homo sapiens
tcataacatgagagt

SEQ ID NO: 155751 - DNA, 15 bp, Homo sapiens
cataacatgagagtt

SEQ ID NO: 155752 - DNA, 15 bp, Homo sapiens
ataacatgagagttg

SEQ ID NO: 155753 - DNA, 15 bp, Homo sapiens
taacatgagagttgt

SEQ ID NO: 155754 - DNA, 15 bp, Homo sapiens
aacatgagagttgtt

SEQ ID NO: 155755 - DNA, 15 bp, Homo sapiens
acatgagagttgtta

SEQ ID NO: 155756 - DNA, 15 bp, Homo sapiens
catgagagttgttat

SEQ ID NO: 155757 - DNA, 15 bp, Homo sapiens
atgagagttgttatg

SEQ ID NO: 155758 - DNA, 15 bp, Homo sapiens
tgagagttgttatgc

SEQ ID NO: 155759 - DNA, 15 bp, Homo sapiens
gagagttgttatgcc

SEQ ID NO: 155760 - DNA, 15 bp, Homo sapiens
agagttgttatgccc

SEQ ID NO: 155761 - DNA, 15 bp, Homo sapiens
gagttgttatgccca

SEQ ID NO: 155762 - DNA, 15 bp, Homo sapiens
agttgttatgcccag

SEQ ID NO: 155763 - DNA, 15 bp, Homo sapiens
gttgttatgcccaga

SEQ ID NO: 155764 - DNA, 15 bp, Homo sapiens
ttgttatgcccagat

SEQ ID NO: 155765 - DNA, 15 bp, Homo sapiens
tgttatgcccagatg

SEQ ID NO: 155766 - DNA, 15 bp, Homo sapiens
gttatgcccagatgc

SEQ ID NO: 155767 - DNA, 15 bp, Homo sapiens
ttatgcccagatgca

SEQ ID NO: 155768 - DNA, 15 bp, Homo sapiens
tatgcccagatgcac

SEQ ID NO: 155769 - DNA, 15 bp, Homo sapiens
atgcccagatgcact

SEQ ID NO: 155770 - DNA, 15 bp, Homo sapiens
tgcccagatgcactt

SEQ ID NO: 155771 - DNA, 15 bp, Homo sapiens
gcccagatgcacttg

SEQ ID NO: 155772 - DNA, 15 bp, Homo sapiens
cccagatgcacttga

SEQ ID NO: 155773 - DNA, 15 bp, Homo sapiens
ccagatgcacttgac

SEQ ID NO: 155774 - DNA, 15 bp, Homo sapiens
cagatgcacttgaca

SEQ ID NO: 155775 - DNA, 15 bp, Homo sapiens
agatgcacttgacat

SEQ ID NO: 155776 - DNA, 15 bp, Homo sapiens
gatgcacttgacatg

SEQ ID NO: 155777 - DNA, 15 bp, Homo sapiens
atgcacttgacatgt

SEQ ID NO: 155778 - DNA, 15 bp, Homo sapiens
tgcacttgacatgtg

SEQ ID NO: 155779 - DNA, 15 bp, Homo sapiens
gcacttgacatgtga

SEQ ID NO: 155780 - DNA, 15 bp, Homo sapiens
cacttgacatgtgaa

SEQ ID NO: 155781 - DNA, 15 bp, Homo sapiens
acttgacatgtgaat

SEQ ID NO: 155782 - DNA, 15 bp, Homo sapiens
cttgacatgtgaatt

SEQ ID NO: 155783 - DNA, 15 bp, Homo sapiens
ttgacatgtgaattt

SEQ ID NO: 155784 - DNA, 15 bp, Homo sapiens
tgacatgtgaattta

SEQ ID NO: 155785 - DNA, 15 bp, Homo sapiens
gacatgtgaatttat

SEQ ID NO: 155786 - DNA, 15 bp, Homo sapiens
acatgtgaatttatt

SEQ ID NO: 155787 - DNA, 15 bp, Homo sapiens
catgtgaatttatta

SEQ ID NO: 155788 - DNA, 15 bp, Homo sapiens
atgtgaatttattag

SEQ ID NO: 155789 - DNA, 15 bp, Homo sapiens
tgtgaatttattaga

SEQ ID NO: 155790 - DNA, 15 bp, Homo sapiens
gtgaatttattagaa

SEQ ID NO: 155791 - DNA, 15 bp, Homo sapiens
tgaatttattagaaa

SEQ ID NO: 155792 - DNA, 15 bp, Homo sapiens
gaatttattagaaac

SEQ ID NO: 155793 - DNA, 15 bp, Homo sapiens
aatttattagaaaca

SEQ ID NO: 155794 - DNA, 15 bp, Homo sapiens
atttattagaaacat

SEQ ID NO: 155795 - DNA, 15 bp, Homo sapiens
tttattagaaacatg

SEQ ID NO: 155796 - DNA, 15 bp, Homo sapiens
ttattagaaacatga

SEQ ID NO: 155797 - DNA, 15 bp, Homo sapiens
tattagaaacatgat

SEQ ID NO: 155798 - DNA, 15 bp, Homo sapiens
attagaaacatgatt

SEQ ID NO: 155799 - DNA, 15 bp, Homo sapiens
ttagaaacatgattt

SEQ ID NO: 155800 - DNA, 15 bp, Homo sapiens
tagaaacatgatttt

SEQ ID NO: 155801 - DNA, 15 bp, Homo sapiens
agaaacatgattttt

SEQ ID NO: 155802 - DNA, 15 bp, Homo sapiens
gaaacatgatttttc

SEQ ID NO: 155803 - DNA, 15 bp, Homo sapiens
aaacatgatttttct

SEQ ID NO: 155804 - DNA, 15 bp, Homo sapiens
aacatgatttttctc

SEQ ID NO: 155805 - DNA, 15 bp, Homo sapiens
acatgatttttctct

SEQ ID NO: 155806 - DNA, 15 bp, Homo sapiens
catgatttttctctg

SEQ ID NO: 155807 - DNA, 15 bp, Homo sapiens
atgatttttctctga

SEQ ID NO: 155808 - DNA, 15 bp, Homo sapiens
tgatttttctctgag

SEQ ID NO: 155809 - DNA, 15 bp, Homo sapiens
gatttttctctgagt

SEQ ID NO: 155810 - DNA, 15 bp, Homo sapiens
atttttctctgagtt

SEQ ID NO: 155811 - DNA, 15 bp, Homo sapiens
tttttctctgagttg

SEQ ID NO: 155812 - DNA, 15 bp, Homo sapiens
ttttctctgagttga

SEQ ID NO: 155813 - DNA, 15 bp, Homo sapiens
tttctctgagttgat

SEQ ID NO: 155814 - DNA, 15 bp, Homo sapiens
ttctctgagttgatg

SEQ ID NO: 155815 - DNA, 15 bp, Homo sapiens
tctctgagttgatgt

SEQ ID NO: 155816 - DNA, 15 bp, Homo sapiens
ctctgagttgatgtt

SEQ ID NO: 155817 - DNA, 15 bp, Homo sapiens
tctgagttgatgttt

SEQ ID NO: 155818 - DNA, 15 bp, Homo sapiens
ctgagttgatgttta

SEQ ID NO: 155819 - DNA, 15 bp, Homo sapiens
tgagttgatgtttaa

SEQ ID NO: 155820 - DNA, 15 bp, Homo sapiens
gagttgatgtttaac

SEQ ID NO: 155821 - DNA, 15 bp, Homo sapiens
agttgatgtttaact

SEQ ID NO: 155822 - DNA, 15 bp, Homo sapiens
gttgatgtttaactc

SEQ ID NO: 155823 - DNA, 15 bp, Homo sapiens
ttgatgtttaactca

SEQ ID NO: 155824 - DNA, 15 bp, Homo sapiens
tgatgtttaactcaa

SEQ ID NO: 155825 - DNA, 15 bp, Homo sapiens
gatgtttaactcaaa

SEQ ID NO: 155826 - DNA, 15 bp, Homo sapiens
atgtttaactcaaac

SEQ ID NO: 155827 - DNA, 15 bp, Homo sapiens
tgtttaactcaaact

SEQ ID NO: 155828 - DNA, 15 bp, Homo sapiens
gtttaactcaaactg

SEQ ID NO: 155829 - DNA, 15 bp, Homo sapiens
tttaactcaaactga

SEQ ID NO: 155830 - DNA, 15 bp, Homo sapiens
ttaactcaaactgat

SEQ ID NO: 155831 - DNA, 15 bp, Homo sapiens
taactcaaactgata

SEQ ID NO: 155832 - DNA, 15 bp, Homo sapiens
aactcaaactgatag

SEQ ID NO: 155833 - DNA, 15 bp, Homo sapiens
actcaaactgataga

SEQ ID NO: 155834 - DNA, 15 bp, Homo sapiens
ctcaaactgatagaa

SEQ ID NO: 155835 - DNA, 15 bp, Homo sapiens
tcaaactgatagaaa

SEQ ID NO: 155836 - DNA, 15 bp, Homo sapiens
caaactgatagaaaa

SEQ ID NO: 155837 - DNA, 15 bp, Homo sapiens
aaactgatagaaaag

SEQ ID NO: 155838 - DNA, 15 bp, Homo sapiens
aactgatagaaaaga

SEQ ID NO: 155839 - DNA, 15 bp, Homo sapiens
actgatagaaaagat

SEQ ID NO: 155840 - DNA, 15 bp, Homo sapiens
ctgatagaaaagata

SEQ ID NO: 155841 - DNA, 15 bp, Homo sapiens
tgatagaaaagatag

SEQ ID NO: 155842 - DNA, 15 bp, Homo sapiens
gatagaaaagatagg

SEQ ID NO: 155843 - DNA, 15 bp, Homo sapiens
atagaaaagataggt

SEQ ID NO: 155844 - DNA, 15 bp, Homo sapiens
tagaaaagataggtc

SEQ ID NO: 155845 - DNA, 15 bp, Homo sapiens
agaaaagataggtca

SEQ ID NO: 155846 - DNA, 15 bp, Homo sapiens
gaaaagataggtcag

SEQ ID NO: 155847 - DNA, 15 bp, Homo sapiens
aaaagataggtcaga

SEQ ID NO: 155848 - DNA, 15 bp, Homo sapiens
aaagataggtcagaa

SEQ ID NO: 155849 - DNA, 15 bp, Homo sapiens
aagataggtcagaat

SEQ ID NO: 155850 - DNA, 15 bp, Homo sapiens
agataggtcagaata

SEQ ID NO: 155851 - DNA, 15 bp, Homo sapiens
gataggtcagaatat

SEQ ID NO: 155852 - DNA, 15 bp, Homo sapiens
ataggtcagaatata

SEQ ID NO: 155853 - DNA, 15 bp, Homo sapiens
taggtcagaatatag

SEQ ID NO: 155854 - DNA, 15 bp, Homo sapiens
aggtcagaatatagt

SEQ ID NO: 155855 - DNA, 15 bp, Homo sapiens
ggtcagaatatagtt

SEQ ID NO: 155856 - DNA, 15 bp, Homo sapiens
gtcagaatatagttg

SEQ ID NO: 155857 - DNA, 15 bp, Homo sapiens
tcagaatatagttgg

SEQ ID NO: 155858 - DNA, 15 bp, Homo sapiens
cagaatatagttggc

SEQ ID NO: 155859 - DNA, 15 bp, Homo sapiens
agaatatagttggcc

SEQ ID NO: 155860 - DNA, 15 bp, Homo sapiens
gaatatagttggcca

SEQ ID NO: 155861 - DNA, 15 bp, Homo sapiens
aatatagttggccaa

SEQ ID NO: 155862 - DNA, 15 bp, Homo sapiens
atatagttggccaac

SEQ ID NO: 155863 - DNA, 15 bp, Homo sapiens
tatagttggccaaca

SEQ ID NO: 155864 - DNA, 15 bp, Homo sapiens
atagttggccaacag

SEQ ID NO: 155865 - DNA, 15 bp, Homo sapiens
tagttggccaacaga

SEQ ID NO: 155866 - DNA, 15 bp, Homo sapiens
agttggccaacagag

SEQ ID NO: 155867 - DNA, 15 bp, Homo sapiens
gttggccaacagaga

SEQ ID NO: 155868 - DNA, 15 bp, Homo sapiens
ttggccaacagagaa

SEQ ID NO: 155869 - DNA, 15 bp, Homo sapiens
tggccaacagagaag

SEQ ID NO: 155870 - DNA, 15 bp, Homo sapiens
ggccaacagagaaga

SEQ ID NO: 155871 - DNA, 15 bp, Homo sapiens
gccaacagagaagac

SEQ ID NO: 155872 - DNA, 15 bp, Homo sapiens
ccaacagagaagact

SEQ ID NO: 155873 - DNA, 15 bp, Homo sapiens
caacagagaagactt

SEQ ID NO: 155874 - DNA, 15 bp, Homo sapiens
aacagagaagacttg

SEQ ID NO: 155875 - DNA, 15 bp, Homo sapiens
acagagaagacttgt

SEQ ID NO: 155876 - DNA, 15 bp, Homo sapiens
cagagaagacttgtt

SEQ ID NO: 155877 - DNA, 15 bp, Homo sapiens
agagaagacttgtta

SEQ ID NO: 155878 - DNA, 15 bp, Homo sapiens
gagaagacttgttag

SEQ ID NO: 155879 - DNA, 15 bp, Homo sapiens
agaagacttgttaga

SEQ ID NO: 155880 - DNA, 15 bp, Homo sapiens
gaagacttgttagac

SEQ ID NO: 155881 - DNA, 15 bp, Homo sapiens
aagacttgttagact

SEQ ID NO: 155882 - DNA, 15 bp, Homo sapiens
agacttgttagacta

SEQ ID NO: 155883 - DNA, 15 bp, Homo sapiens
gacttgttagactat

SEQ ID NO: 155884 - DNA, 15 bp, Homo sapiens
acttgttagactatt

SEQ ID NO: 155885 - DNA, 15 bp, Homo sapiens
cttgttagactattg

SEQ ID NO: 155886 - DNA, 15 bp, Homo sapiens
ttgttagactattgt

SEQ ID NO: 155887 - DNA, 15 bp, Homo sapiens
tgttagactattgtc

SEQ ID NO: 155888 - DNA, 15 bp, Homo sapiens
gttagactattgtct

SEQ ID NO: 155889 - DNA, 15 bp, Homo sapiens
ttagactattgtctg

SEQ ID NO: 155890 - DNA, 15 bp, Homo sapiens
tagactattgtctgc

SEQ ID NO: 155891 - DNA, 15 bp, Homo sapiens
agactattgtctgca

SEQ ID NO: 155892 - DNA, 15 bp, Homo sapiens
gactattgtctgcat

SEQ ID NO: 155893 - DNA, 15 bp, Homo sapiens
actattgtctgcatg

SEQ ID NO: 155894 - DNA, 15 bp, Homo sapiens
ctattgtctgcatgt

SEQ ID NO: 155895 - DNA, 15 bp, Homo sapiens
tattgtctgcatgtc

SEQ ID NO: 155896 - DNA, 15 bp, Homo sapiens
attgtctgcatgtca

SEQ ID NO: 155897 - DNA, 15 bp, Homo sapiens
ttgtctgcatgtcag

SEQ ID NO: 155898 - DNA, 15 bp, Homo sapiens
tgtctgcatgtcagt

SEQ ID NO: 155899 - DNA, 15 bp, Homo sapiens
gtctgcatgtcagtg

SEQ ID NO: 155900 - DNA, 15 bp, Homo sapiens
tctgcatgtcagtgt

SEQ ID NO: 155901 - DNA, 15 bp, Homo sapiens
ctgcatgtcagtgtt

SEQ ID NO: 155902 - DNA, 15 bp, Homo sapiens
tgcatgtcagtgttt

SEQ ID NO: 155903 - DNA, 15 bp, Homo sapiens
gcatgtcagtgtttg

SEQ ID NO: 155904 - DNA, 15 bp, Homo sapiens
catgtcagtgtttgc

SEQ ID NO: 155905 - DNA, 15 bp, Homo sapiens
atgtcagtgtttgca

SEQ ID NO: 155906 - DNA, 15 bp, Homo sapiens
tgtcagtgtttgcat

SEQ ID NO: 155907 - DNA, 15 bp, Homo sapiens
gtcagtgtttgcatg

SEQ ID NO: 155908 - DNA, 15 bp, Homo sapiens
tcagtgtttgcatgc

SEQ ID NO: 155909 - DNA, 15 bp, Homo sapiens
cagtgtttgcatgct

SEQ ID NO: 155910 - DNA, 15 bp, Homo sapiens
agtgtttgcatgcta

SEQ ID NO: 155911 - DNA, 15 bp, Homo sapiens
gtgtttgcatgctaa

SEQ ID NO: 155912 - DNA, 15 bp, Homo sapiens
tgtttgcatgctaac

SEQ ID NO: 155913 - DNA, 15 bp, Homo sapiens
gtttgcatgctaact

SEQ ID NO: 155914 - DNA, 15 bp, Homo sapiens
tttgcatgctaactt

SEQ ID NO: 155915 - DNA, 15 bp, Homo sapiens
ttgcatgctaacttg

SEQ ID NO: 155916 - DNA, 15 bp, Homo sapiens
tgcatgctaacttgc

SEQ ID NO: 155917 - DNA, 15 bp, Homo sapiens
gcatgctaacttgct

SEQ ID NO: 155918 - DNA, 15 bp, Homo sapiens
catgctaacttgctt

SEQ ID NO: 155919 - DNA, 15 bp, Homo sapiens
atgctaacttgctta

SEQ ID NO: 155920 - DNA, 15 bp, Homo sapiens
tgctaacttgcttag

SEQ ID NO: 155921 - DNA, 15 bp, Homo sapiens
gctaacttgcttagt

SEQ ID NO: 155922 - DNA, 15 bp, Homo sapiens
ctaacttgcttagtt

SEQ ID NO: 155923 - DNA, 15 bp, Homo sapiens
taacttgcttagtta

SEQ ID NO: 155924 - DNA, 15 bp, Homo sapiens
aacttgcttagttag

SEQ ID NO: 155925 - DNA, 15 bp, Homo sapiens
acttgcttagttaga

SEQ ID NO: 155926 - DNA, 15 bp, Homo sapiens
cttgcttagttagaa

SEQ ID NO: 155927 - DNA, 15 bp, Homo sapiens
ttgcttagttagaaa

SEQ ID NO: 155928 - DNA, 15 bp, Homo sapiens
tgcttagttagaaag

SEQ ID NO: 155929 - DNA, 15 bp, Homo sapiens
gcttagttagaaagg

SEQ ID NO: 155930 - DNA, 15 bp, Homo sapiens
cttagttagaaaggt

SEQ ID NO: 155931 - DNA, 15 bp, Homo sapiens
ttagttagaaaggtt

SEQ ID NO: 155932 - DNA, 15 bp, Homo sapiens
tagttagaaaggtta

SEQ ID NO: 155933 - DNA, 15 bp, Homo sapiens
agttagaaaggttaa

SEQ ID NO: 155934 - DNA, 15 bp, Homo sapiens
gttagaaaggttaaa

SEQ ID NO: 155935 - DNA, 15 bp, Homo sapiens
ttagaaaggttaaat

SEQ ID NO: 155936 - DNA, 15 bp, Homo sapiens
tagaaaggttaaatt

SEQ ID NO: 155937 - DNA, 15 bp, Homo sapiens
agaaaggttaaattt

SEQ ID NO: 155938 - DNA, 15 bp, Homo sapiens
gaaaggttaaatttt

SEQ ID NO: 155939 - DNA, 15 bp, Homo sapiens
aaaggttaaattttt

SEQ ID NO: 155940 - DNA, 15 bp, Homo sapiens
aaggttaaatttttt

SEQ ID NO: 155941 - DNA, 15 bp, Homo sapiens
aggttaaattttttc

SEQ ID NO: 155942 - DNA, 15 bp, Homo sapiens
ggttaaattttttca

SEQ ID NO: 155943 - DNA, 15 bp, Homo sapiens
gttaaattttttcac

SEQ ID NO: 155944 - DNA, 15 bp, Homo sapiens
ttaaattttttcact

SEQ ID NO: 155945 - DNA, 15 bp, Homo sapiens
taaattttttcactc

SEQ ID NO: 155946 - DNA, 15 bp, Homo sapiens
aaattttttcactct

SEQ ID NO: 155947 - DNA, 15 bp, Homo sapiens
aattttttcactcta

SEQ ID NO: 155948 - DNA, 15 bp, Homo sapiens
attttttcactctat

SEQ ID NO: 155949 - DNA, 15 bp, Homo sapiens
ttttttcactctata

SEQ ID NO: 155950 - DNA, 15 bp, Homo sapiens
tttttcactctataa

SEQ ID NO: 155951 - DNA, 15 bp, Homo sapiens
ttttcactctataaa

SEQ ID NO: 155952 - DNA, 15 bp, Homo sapiens
tttcactctataaaa

SEQ ID NO: 155953 - DNA, 15 bp, Homo sapiens
ttcactctataaaat

SEQ ID NO: 155954 - DNA, 15 bp, Homo sapiens
tcactctataaaatc

SEQ ID NO: 155955 - DNA, 15 bp, Homo sapiens
cactctataaaatca

SEQ ID NO: 155956 - DNA, 15 bp, Homo sapiens
actctataaaatcaa

SEQ ID NO: 155957 - DNA, 15 bp, Homo sapiens
ctctataaaatcaag

SEQ ID NO: 155958 - DNA, 15 bp, Homo sapiens
tctataaaatcaaga

SEQ ID NO: 155959 - DNA, 15 bp, Homo sapiens
ctataaaatcaagaa

SEQ ID NO: 155960 - DNA, 15 bp, Homo sapiens
tataaaatcaagaaa

SEQ ID NO: 155961 - DNA, 15 bp, Homo sapiens
ataaaatcaagaaat

SEQ ID NO: 155962 - DNA, 15 bp, Homo sapiens
taaaatcaagaaata

SEQ ID NO: 155963 - DNA, 15 bp, Homo sapiens
aaaatcaagaaatat

SEQ ID NO: 155964 - DNA, 15 bp, Homo sapiens
aaatcaagaaatata

SEQ ID NO: 155965 - DNA, 15 bp, Homo sapiens
aatcaagaaatatag

SEQ ID NO: 155966 - DNA, 15 bp, Homo sapiens
atcaagaaatataga

SEQ ID NO: 155967 - DNA, 15 bp, Homo sapiens
tcaagaaatatagag

SEQ ID NO: 155968 - DNA, 15 bp, Homo sapiens
caagaaatatagaga

SEQ ID NO: 155969 - DNA, 15 bp, Homo sapiens
aagaaatatagagaa

SEQ ID NO: 155970 - DNA, 15 bp, Homo sapiens
agaaatatagagaaa

SEQ ID NO: 155971 - DNA, 15 bp, Homo sapiens
gaaatatagagaaaa

SEQ ID NO: 155972 - DNA, 15 bp, Homo sapiens
aaatatagagaaaag

SEQ ID NO: 155973 - DNA, 15 bp, Homo sapiens
aatatagagaaaagg

SEQ ID NO: 155974 - DNA, 15 bp, Homo sapiens
atatagagaaaaggt

SEQ ID NO: 155975 - DNA, 15 bp, Homo sapiens
tatagagaaaaggtc

SEQ ID NO: 155976 - DNA, 15 bp, Homo sapiens
atagagaaaaggtct

SEQ ID NO: 155977 - DNA, 15 bp, Homo sapiens
tagagaaaaggtctg

SEQ ID NO: 155978 - DNA, 15 bp, Homo sapiens
agagaaaaggtctgc

SEQ ID NO: 155979 - DNA, 15 bp, Homo sapiens
gagaaaaggtctgca

SEQ ID NO: 155980 - DNA, 15 bp, Homo sapiens
agaaaaggtctgcag

SEQ ID NO: 155981 - DNA, 15 bp, Homo sapiens
gaaaaggtctgcaga

SEQ ID NO: 155982 - DNA, 15 bp, Homo sapiens
aaaaggtctgcagag

SEQ ID NO: 155983 - DNA, 15 bp, Homo sapiens
aaaggtctgcagaga

SEQ ID NO: 155984 - DNA, 15 bp, Homo sapiens
aaggtctgcagagag

SEQ ID NO: 155985 - DNA, 15 bp, Homo sapiens
aggtctgcagagagt

SEQ ID NO: 155986 - DNA, 15 bp, Homo sapiens
ggtctgcagagagtc

SEQ ID NO: 155987 - DNA, 15 bp, Homo sapiens
gtctgcagagagtct

SEQ ID NO: 155988 - DNA, 15 bp, Homo sapiens
tctgcagagagtctt

SEQ ID NO: 155989 - DNA, 15 bp, Homo sapiens
ctgcagagagtcttt

SEQ ID NO: 155990 - DNA, 15 bp, Homo sapiens
tgcagagagtctttc

SEQ ID NO: 155991 - DNA, 15 bp, Homo sapiens
gcagagagtctttca

SEQ ID NO: 155992 - DNA, 15 bp, Homo sapiens
cagagagtctttcat

SEQ ID NO: 155993 - DNA, 15 bp, Homo sapiens
agagagtctttcatt

SEQ ID NO: 155994 - DNA, 15 bp, Homo sapiens
gagagtctttcattt

SEQ ID NO: 155995 - DNA, 15 bp, Homo sapiens
agagtctttcatttg

SEQ ID NO: 155996 - DNA, 15 bp, Homo sapiens
gagtctttcatttga

SEQ ID NO: 155997 - DNA, 15 bp, Homo sapiens
agtctttcatttgat

SEQ ID NO: 155998 - DNA, 15 bp, Homo sapiens
gtctttcatttgatg

SEQ ID NO: 155999 - DNA, 15 bp, Homo sapiens
tctttcatttgatga

SEQ ID NO: 156000 - DNA, 15 bp, Homo sapiens
ctttcatttgatgat

SEQ ID NO: 156001 - DNA, 15 bp, Homo sapiens
tttcatttgatgatg

SEQ ID NO: 156002 - DNA, 15 bp, Homo sapiens
ttcatttgatgatgt

SEQ ID NO: 156003 - DNA, 15 bp, Homo sapiens
tcatttgatgatgtg

SEQ ID NO: 156004 - DNA, 15 bp, Homo sapiens
catttgatgatgtgg

SEQ ID NO: 156005 - DNA, 15 bp, Homo sapiens
atttgatgatgtgga

SEQ ID NO: 156006 - DNA, 15 bp, Homo sapiens
tttgatgatgtggat

SEQ ID NO: 156007 - DNA, 15 bp, Homo sapiens
ttgatgatgtggata

SEQ ID NO: 156008 - DNA, 15 bp, Homo sapiens
tgatgatgtggatat

SEQ ID NO: 156009 - DNA, 15 bp, Homo sapiens
gatgatgtggatatt

SEQ ID NO: 156010 - DNA, 15 bp, Homo sapiens
atgatgtggatattg

SEQ ID NO: 156011 - DNA, 15 bp, Homo sapiens
tgatgtggatattgt

SEQ ID NO: 156012 - DNA, 15 bp, Homo sapiens
gatgtggatattgtt

SEQ ID NO: 156013 - DNA, 15 bp, Homo sapiens
atgtggatattgtta

SEQ ID NO: 156014 - DNA, 15 bp, Homo sapiens
tgtggatattgttaa

SEQ ID NO: 156015 - DNA, 15 bp, Homo sapiens
gtggatattgttaag

SEQ ID NO: 156016 - DNA, 15 bp, Homo sapiens
tggatattgttaaga

SEQ ID NO: 156017 - DNA, 15 bp, Homo sapiens
ggatattgttaagag

SEQ ID NO: 156018 - DNA, 15 bp, Homo sapiens
gatattgttaagagc

SEQ ID NO: 156019 - DNA, 15 bp, Homo sapiens
atattgttaagagcg

SEQ ID NO: 156020 - DNA, 15 bp, Homo sapiens
tattgttaagagcgg

SEQ ID NO: 156021 - DNA, 15 bp, Homo sapiens
attgttaagagcggg

SEQ ID NO: 156022 - DNA, 15 bp, Homo sapiens
ttgttaagagcggga

SEQ ID NO: 156023 - DNA, 15 bp, Homo sapiens
tgttaagagcgggag

SEQ ID NO: 156024 - DNA, 15 bp, Homo sapiens
gttaagagcgggagt

SEQ ID NO: 156025 - DNA, 15 bp, Homo sapiens
ttaagagcgggagtt

SEQ ID NO: 156026 - DNA, 15 bp, Homo sapiens
taagagcgggagttt

SEQ ID NO: 156027 - DNA, 15 bp, Homo sapiens
aagagcgggagtttg

SEQ ID NO: 156028 - DNA, 15 bp, Homo sapiens
agagcgggagtttgg

SEQ ID NO: 156029 - DNA, 15 bp, Homo sapiens
gagcgggagtttgga

SEQ ID NO: 156030 - DNA, 15 bp, Homo sapiens
agcgggagtttggag

SEQ ID NO: 156031 - DNA, 15 bp, Homo sapiens
gcgggagtttggagc

SEQ ID NO: 156032 - DNA, 15 bp, Homo sapiens
cgggagtttggagca

SEQ ID NO: 156033 - DNA, 15 bp, Homo sapiens
gggagtttggagcat

SEQ ID NO: 156034 - DNA, 15 bp, Homo sapiens
ggagtttggagcata

SEQ ID NO: 156035 - DNA, 15 bp, Homo sapiens
gagtttggagcatac

SEQ ID NO: 156036 - DNA, 15 bp, Homo sapiens
agtttggagcataca

SEQ ID NO: 156037 - DNA, 15 bp, Homo sapiens
gtttggagcatacag

SEQ ID NO: 156038 - DNA, 15 bp, Homo sapiens
tttggagcatacaga

SEQ ID NO: 156039 - DNA, 15 bp, Homo sapiens
ttggagcatacagag

SEQ ID NO: 156040 - DNA, 15 bp, Homo sapiens
tggagcatacagagc

SEQ ID NO: 156041 - DNA, 15 bp, Homo sapiens
ggagcatacagagct

SEQ ID NO: 156042 - DNA, 15 bp, Homo sapiens
gagcatacagagctc

SEQ ID NO: 156043 - DNA, 15 bp, Homo sapiens
agcatacagagctca

SEQ ID NO: 156044 - DNA, 15 bp, Homo sapiens
gcatacagagctcaa

SEQ ID NO: 156045 - DNA, 15 bp, Homo sapiens
catacagagctcaag

SEQ ID NO: 156046 - DNA, 15 bp, Homo sapiens
atacagagctcaagt

SEQ ID NO: 156047 - DNA, 15 bp, Homo sapiens
tacagagctcaagtt

SEQ ID NO: 156048 - DNA, 15 bp, Homo sapiens
acagagctcaagttg

SEQ ID NO: 156049 - DNA, 15 bp, Homo sapiens
cagagctcaagttga

SEQ ID NO: 156050 - DNA, 15 bp, Homo sapiens
agagctcaagttgaa

SEQ ID NO: 156051 - DNA, 15 bp, Homo sapiens
gagctcaagttgaat

SEQ ID NO: 156052 - DNA, 15 bp, Homo sapiens
agctcaagttgaatc

SEQ ID NO: 156053 - DNA, 15 bp, Homo sapiens
gctcaagttgaatcc

SEQ ID NO: 156054 - DNA, 15 bp, Homo sapiens
ctcaagttgaatcct

SEQ ID NO: 156055 - DNA, 15 bp, Homo sapiens
tcaagttgaatcctg

SEQ ID NO: 156056 - DNA, 15 bp, Homo sapiens
caagttgaatcctga

SEQ ID NO: 156057 - DNA, 15 bp, Homo sapiens
aagttgaatcctgac

SEQ ID NO: 156058 - DNA, 15 bp, Homo sapiens
agttgaatcctgact

SEQ ID NO: 156059 - DNA, 15 bp, Homo sapiens
gttgaatcctgactt

SEQ ID NO: 156060 - DNA, 15 bp, Homo sapiens
ttgaatcctgacttt

SEQ ID NO: 156061 - DNA, 15 bp, Homo sapiens
tgaatcctgactttg

SEQ ID NO: 156062 - DNA, 15 bp, Homo sapiens
gaatcctgactttgc

SEQ ID NO: 156063 - DNA, 15 bp, Homo sapiens
aatcctgactttgct

SEQ ID NO: 156064 - DNA, 15 bp, Homo sapiens
atcctgactttgcta

SEQ ID NO: 156065 - DNA, 15 bp, Homo sapiens
tcctgactttgctac

SEQ ID NO: 156066 - DNA, 15 bp, Homo sapiens
cctgactttgctact

SEQ ID NO: 156067 - DNA, 15 bp, Homo sapiens
ctgactttgctactt

SEQ ID NO: 156068 - DNA, 15 bp, Homo sapiens
tgactttgctactta

SEQ ID NO: 156069 - DNA, 15 bp, Homo sapiens
gactttgctacttat

SEQ ID NO: 156070 - DNA, 15 bp, Homo sapiens
actttgctacttatt

SEQ ID NO: 156071 - DNA, 15 bp, Homo sapiens
ctttgctacttattg

SEQ ID NO: 156072 - DNA, 15 bp, Homo sapiens
tttgctacttattgg

SEQ ID NO: 156073 - DNA, 15 bp, Homo sapiens
ttgctacttattggc

SEQ ID NO: 156074 - DNA, 15 bp, Homo sapiens
tgctacttattggct

SEQ ID NO: 156075 - DNA, 15 bp, Homo sapiens
gctacttattggcta

SEQ ID NO: 156076 - DNA, 15 bp, Homo sapiens
ctacttattggctat

SEQ ID NO: 156077 - DNA, 15 bp, Homo sapiens
tacttattggctata

SEQ ID NO: 156078 - DNA, 15 bp, Homo sapiens
acttattggctatat

SEQ ID NO: 156079 - DNA, 15 bp, Homo sapiens
cttattggctatatg

SEQ ID NO: 156080 - DNA, 15 bp, Homo sapiens
ttattggctatatga

SEQ ID NO: 156081 - DNA, 15 bp, Homo sapiens
tattggctatatgac

SEQ ID NO: 156082 - DNA, 15 bp, Homo sapiens
attggctatatgacc

SEQ ID NO: 156083 - DNA, 15 bp, Homo sapiens
ttggctatatgacct

SEQ ID NO: 156084 - DNA, 15 bp, Homo sapiens
tggctatatgacctt

SEQ ID NO: 156085 - DNA, 15 bp, Homo sapiens
ggctatatgaccttg

SEQ ID NO: 156086 - DNA, 15 bp, Homo sapiens
gctatatgaccttgg

SEQ ID NO: 156087 - DNA, 15 bp, Homo sapiens
ctatatgaccttggg

SEQ ID NO: 156088 - DNA, 15 bp, Homo sapiens
tatatgaccttgggc

SEQ ID NO: 156089 - DNA, 15 bp, Homo sapiens
atatgaccttgggca

SEQ ID NO: 156090 - DNA, 15 bp, Homo sapiens
tatgaccttgggcaa

SEQ ID NO: 156091 - DNA, 15 bp, Homo sapiens
atgaccttgggcaag

SEQ ID NO: 156092 - DNA, 15 bp, Homo sapiens
tgaccttgggcaagc

SEQ ID NO: 156093 - DNA, 15 bp, Homo sapiens
gaccttgggcaagct

SEQ ID NO: 156094 - DNA, 15 bp, Homo sapiens
accttgggcaagctg

SEQ ID NO: 156095 - DNA, 15 bp, Homo sapiens
ccttgggcaagctgc

SEQ ID NO: 156096 - DNA, 15 bp, Homo sapiens
cttgggcaagctgct

SEQ ID NO: 156097 - DNA, 15 bp, Homo sapiens
ttgggcaagctgctt

SEQ ID NO: 156098 - DNA, 15 bp, Homo sapiens
tgggcaagctgctta

SEQ ID NO: 156099 - DNA, 15 bp, Homo sapiens
gggcaagctgcttag

SEQ ID NO: 156100 - DNA, 15 bp, Homo sapiens
ggcaagctgcttagt

SEQ ID NO: 156101 - DNA, 15 bp, Homo sapiens
gcaagctgcttagtc

SEQ ID NO: 156102 - DNA, 15 bp, Homo sapiens
caagctgcttagtct

SEQ ID NO: 156103 - DNA, 15 bp, Homo sapiens
aagctgcttagtctc

SEQ ID NO: 156104 - DNA, 15 bp, Homo sapiens
agctgcttagtctct

SEQ ID NO: 156105 - DNA, 15 bp, Homo sapiens
gctgcttagtctctc

SEQ ID NO: 156106 - DNA, 15 bp, Homo sapiens
ctgcttagtctctct

SEQ ID NO: 156107 - DNA, 15 bp, Homo sapiens
tgcttagtctctctg

SEQ ID NO: 156108 - DNA, 15 bp, Homo sapiens
gcttagtctctctga

SEQ ID NO: 156109 - DNA, 15 bp, Homo sapiens
cttagtctctctgat

SEQ ID NO: 156110 - DNA, 15 bp, Homo sapiens
ttagtctctctgatc

SEQ ID NO: 156111 - DNA, 15 bp, Homo sapiens
tagtctctctgatcc

SEQ ID NO: 156112 - DNA, 15 bp, Homo sapiens
agtctctctgatcct

SEQ ID NO: 156113 - DNA, 15 bp, Homo sapiens
gtctctctgatcctc

SEQ ID NO: 156114 - DNA, 15 bp, Homo sapiens
tctctctgatcctca

SEQ ID NO: 156115 - DNA, 15 bp, Homo sapiens
ctctctgatcctcag

SEQ ID NO: 156116 - DNA, 15 bp, Homo sapiens
tctctgatcctcagt

SEQ ID NO: 156117 - DNA, 15 bp, Homo sapiens
ctctgatcctcagtt

SEQ ID NO: 156118 - DNA, 15 bp, Homo sapiens
tctgatcctcagtta

SEQ ID NO: 156119 - DNA, 15 bp, Homo sapiens
ctgatcctcagttac

SEQ ID NO: 156120 - DNA, 15 bp, Homo sapiens
tgatcctcagttacc

SEQ ID NO: 156121 - DNA, 15 bp, Homo sapiens
gatcctcagttacct

SEQ ID NO: 156122 - DNA, 15 bp, Homo sapiens
atcctcagttacctt

SEQ ID NO: 156123 - DNA, 15 bp, Homo sapiens
tcctcagttaccttt

SEQ ID NO: 156124 - DNA, 15 bp, Homo sapiens
cctcagttacctttg

SEQ ID NO: 156125 - DNA, 15 bp, Homo sapiens
ctcagttacctttgt

SEQ ID NO: 156126 - DNA, 15 bp, Homo sapiens
tcagttacctttgtt

SEQ ID NO: 156127 - DNA, 15 bp, Homo sapiens
cagttacctttgttt

SEQ ID NO: 156128 - DNA, 15 bp, Homo sapiens
agttacctttgtttg

SEQ ID NO: 156129 - DNA, 15 bp, Homo sapiens
gttacctttgtttgt

SEQ ID NO: 156130 - DNA, 15 bp, Homo sapiens
ttacctttgtttgtt

SEQ ID NO: 156131 - DNA, 15 bp, Homo sapiens
tacctttgtttgttg

SEQ ID NO: 156132 - DNA, 15 bp, Homo sapiens
acctttgtttgttga

SEQ ID NO: 156133 - DNA, 15 bp, Homo sapiens
cctttgtttgttgat

SEQ ID NO: 156134 - DNA, 15 bp, Homo sapiens
ctttgtttgttgatg

SEQ ID NO: 156135 - DNA, 15 bp, Homo sapiens
tttgtttgttgatga

SEQ ID NO: 156136 - DNA, 15 bp, Homo sapiens
ttgtttgttgatgat

SEQ ID NO: 156137 - DNA, 15 bp, Homo sapiens
tgtttgttgatgatg

SEQ ID NO: 156138 - DNA, 15 bp, Homo sapiens
gtttgttgatgatga

SEQ ID NO: 156139 - DNA, 15 bp, Homo sapiens
tttgttgatgatgac

SEQ ID NO: 156140 - DNA, 15 bp, Homo sapiens
ttgttgatgatgacc

SEQ ID NO: 156141 - DNA, 15 bp, Homo sapiens
tgttgatgatgacca

SEQ ID NO: 156142 - DNA, 15 bp, Homo sapiens
gttgatgatgaccat

SEQ ID NO: 156143 - DNA, 15 bp, Homo sapiens
ttgatgatgaccatt

SEQ ID NO: 156144 - DNA, 15 bp, Homo sapiens
tgatgatgaccattg

SEQ ID NO: 156145 - DNA, 15 bp, Homo sapiens
gatgatgaccattga

SEQ ID NO: 156146 - DNA, 15 bp, Homo sapiens
atgatgaccattgat

SEQ ID NO: 156147 - DNA, 15 bp, Homo sapiens
tgatgaccattgata

SEQ ID NO: 156148 - DNA, 15 bp, Homo sapiens
gatgaccattgataa

SEQ ID NO: 156149 - DNA, 15 bp, Homo sapiens
atgaccattgataac

SEQ ID NO: 156150 - DNA, 15 bp, Homo sapiens
tgaccattgataaca

SEQ ID NO: 156151 - DNA, 15 bp, Homo sapiens
gaccattgataacac

SEQ ID NO: 156152 - DNA, 15 bp, Homo sapiens
accattgataacaca

SEQ ID NO: 156153 - DNA, 15 bp, Homo sapiens
ccattgataacacaa

SEQ ID NO: 156154 - DNA, 15 bp, Homo sapiens
cattgataacacaac

SEQ ID NO: 156155 - DNA, 15 bp, Homo sapiens
attgataacacaacc

SEQ ID NO: 156156 - DNA, 15 bp, Homo sapiens
ttgataacacaacca

SEQ ID NO: 156157 - DNA, 15 bp, Homo sapiens
tgataacacaaccat

SEQ ID NO: 156158 - DNA, 15 bp, Homo sapiens
gataacacaaccata

SEQ ID NO: 156159 - DNA, 15 bp, Homo sapiens
ataacacaaccataa

SEQ ID NO: 156160 - DNA, 15 bp, Homo sapiens
taacacaaccataaa

SEQ ID NO: 156161 - DNA, 15 bp, Homo sapiens
aacacaaccataaat

SEQ ID NO: 156162 - DNA, 15 bp, Homo sapiens
acacaaccataaata

SEQ ID NO: 156163 - DNA, 15 bp, Homo sapiens
cacaaccataaataa

SEQ ID NO: 156164 - DNA, 15 bp, Homo sapiens
acaaccataaataat

SEQ ID NO: 156165 - DNA, 15 bp, Homo sapiens
caaccataaataatg

SEQ ID NO: 156166 - DNA, 15 bp, Homo sapiens
aaccataaataatga

SEQ ID NO: 156167 - DNA, 15 bp, Homo sapiens
accataaataatgac

SEQ ID NO: 156168 - DNA, 15 bp, Homo sapiens
ccataaataatgaca

SEQ ID NO: 156169 - DNA, 15 bp, Homo sapiens
cataaataatgacaa

SEQ ID NO: 156170 - DNA, 15 bp, Homo sapiens
ataaataatgacaac

SEQ ID NO: 156171 - DNA, 15 bp, Homo sapiens
taaataatgacaaca

SEQ ID NO: 156172 - DNA, 15 bp, Homo sapiens
aaataatgacaacat

SEQ ID NO: 156173 - DNA, 15 bp, Homo sapiens
aataatgacaacata

SEQ ID NO: 156174 - DNA, 15 bp, Homo sapiens
ataatgacaacatag

SEQ ID NO: 156175 - DNA, 15 bp, Homo sapiens
taatgacaacataga

SEQ ID NO: 156176 - DNA, 15 bp, Homo sapiens
aatgacaacatagag

SEQ ID NO: 156177 - DNA, 15 bp, Homo sapiens
atgacaacatagaga

SEQ ID NO: 156178 - DNA, 15 bp, Homo sapiens
tgacaacatagagat

SEQ ID NO: 156179 - DNA, 15 bp, Homo sapiens
gacaacatagagata

SEQ ID NO: 156180 - DNA, 15 bp, Homo sapiens
acaacatagagatag

SEQ ID NO: 156181 - DNA, 15 bp, Homo sapiens
caacatagagatagt

SEQ ID NO: 156182 - DNA, 15 bp, Homo sapiens
aacatagagatagtt

SEQ ID NO: 156183 - DNA, 15 bp, Homo sapiens
acatagagatagttc

SEQ ID NO: 156184 - DNA, 15 bp, Homo sapiens
catagagatagttct

SEQ ID NO: 156185 - DNA, 15 bp, Homo sapiens
atagagatagttctc

SEQ ID NO: 156186 - DNA, 15 bp, Homo sapiens
tagagatagttctca

SEQ ID NO: 156187 - DNA, 15 bp, Homo sapiens
agagatagttctcat

SEQ ID NO: 156188 - DNA, 15 bp, Homo sapiens
gagatagttctcatt

SEQ ID NO: 156189 - DNA, 15 bp, Homo sapiens
agatagttctcatta

SEQ ID NO: 156190 - DNA, 15 bp, Homo sapiens
gatagttctcattat

SEQ ID NO: 156191 - DNA, 15 bp, Homo sapiens
atagttctcattata

SEQ ID NO: 156192 - DNA, 15 bp, Homo sapiens
tagttctcattatag

SEQ ID NO: 156193 - DNA, 15 bp, Homo sapiens
agttctcattatagt

SEQ ID NO: 156194 - DNA, 15 bp, Homo sapiens
gttctcattatagta

SEQ ID NO: 156195 - DNA, 15 bp, Homo sapiens
ttctcattatagtag

SEQ ID NO: 156196 - DNA, 15 bp, Homo sapiens
tctcattatagtagt

SEQ ID NO: 156197 - DNA, 15 bp, Homo sapiens
ctcattatagtagtt

SEQ ID NO: 156198 - DNA, 15 bp, Homo sapiens
tcattatagtagttg

SEQ ID NO: 156199 - DNA, 15 bp, Homo sapiens
atagtagttgttata

SEQ ID NO: 156200 - DNA, 15 bp, Homo sapiens
tagtagttgttatac

SEQ ID NO: 156201 - DNA, 15 bp, Homo sapiens
agtagttgttataca

SEQ ID NO: 156202 - DNA, 15 bp, Homo sapiens
gtagttgttatacag

SEQ ID NO: 156203 - DNA, 15 bp, Homo sapiens
tagttgttatacaga

SEQ ID NO: 156204 - DNA, 15 bp, Homo sapiens
agttgttatacagaa

SEQ ID NO: 156205 - DNA, 15 bp, Homo sapiens
gttgttatacagaat

SEQ ID NO: 156206 - DNA, 15 bp, Homo sapiens
ttgttatacagaatt

SEQ ID NO: 156207 - DNA, 15 bp, Homo sapiens
tgttatacagaatta

SEQ ID NO: 156208 - DNA, 15 bp, Homo sapiens
gttatacagaattat

SEQ ID NO: 156209 - DNA, 15 bp, Homo sapiens
ttatacagaattatt

SEQ ID NO: 156210 - DNA, 15 bp, Homo sapiens
tatacagaattattc

SEQ ID NO: 156211 - DNA, 15 bp, Homo sapiens
atacagaattattca

SEQ ID NO: 156212 - DNA, 15 bp, Homo sapiens
tacagaattattcac

SEQ ID NO: 156213 - DNA, 15 bp, Homo sapiens
acagaattattcact

SEQ ID NO: 156214 - DNA, 15 bp, Homo sapiens
cagaattattcactc

SEQ ID NO: 156215 - DNA, 15 bp, Homo sapiens
agaattattcactca

SEQ ID NO: 156216 - DNA, 15 bp, Homo sapiens
gaattattcactcaa

SEQ ID NO: 156217 - DNA, 15 bp, Homo sapiens
aattattcactcaat

SEQ ID NO: 156218 - DNA, 15 bp, Homo sapiens
attattcactcaatg

SEQ ID NO: 156219 - DNA, 15 bp, Homo sapiens
ttattcactcaatgt

SEQ ID NO: 156220 - DNA, 15 bp, Homo sapiens
tattcactcaatgtt

SEQ ID NO: 156221 - DNA, 15 bp, Homo sapiens
attcactcaatgtta

SEQ ID NO: 156222 - DNA, 15 bp, Homo sapiens
ttcactcaatgttaa

SEQ ID NO: 156223 - DNA, 15 bp, Homo sapiens
tcactcaatgttaat

SEQ ID NO: 156224 - DNA, 15 bp, Homo sapiens
cactcaatgttaatt

SEQ ID NO: 156225 - DNA, 15 bp, Homo sapiens
actcaatgttaattt

SEQ ID NO: 156226 - DNA, 15 bp, Homo sapiens
ctcaatgttaatttt

SEQ ID NO: 156227 - DNA, 15 bp, Homo sapiens
tcaatgttaattttc

SEQ ID NO: 156228 - DNA, 15 bp, Homo sapiens
caatgttaattttct

SEQ ID NO: 156229 - DNA, 15 bp, Homo sapiens
aatgttaattttctg

SEQ ID NO: 156230 - DNA, 15 bp, Homo sapiens
atgttaattttctgc

SEQ ID NO: 156231 - DNA, 15 bp, Homo sapiens
tgttaattttctgca

SEQ ID NO: 156232 - DNA, 15 bp, Homo sapiens
gttaattttctgcat

SEQ ID NO: 156233 - DNA, 15 bp, Homo sapiens
ttaattttctgcatt

SEQ ID NO: 156234 - DNA, 15 bp, Homo sapiens
taattttctgcattg

SEQ ID NO: 156235 - DNA, 15 bp, Homo sapiens
aattttctgcattga

SEQ ID NO: 156236 - DNA, 15 bp, Homo sapiens
attttctgcattgaa

SEQ ID NO: 156237 - DNA, 15 bp, Homo sapiens
ttttctgcattgaaa

SEQ ID NO: 156238 - DNA, 15 bp, Homo sapiens
tttctgcattgaaat

SEQ ID NO: 156239 - DNA, 15 bp, Homo sapiens
ttctgcattgaaatc

SEQ ID NO: 156240 - DNA, 15 bp, Homo sapiens
tctgcattgaaatcc

SEQ ID NO: 156241 - DNA, 15 bp, Homo sapiens
ctgcattgaaatccc

SEQ ID NO: 156242 - DNA, 15 bp, Homo sapiens
tgcattgaaatccca

SEQ ID NO: 156243 - DNA, 15 bp, Homo sapiens
gcattgaaatcccag

SEQ ID NO: 156244 - DNA, 15 bp, Homo sapiens
cattgaaatcccaga

SEQ ID NO: 156245 - DNA, 15 bp, Homo sapiens
attgaaatcccagaa

SEQ ID NO: 156246 - DNA, 15 bp, Homo sapiens
ttgaaatcccagaac

SEQ ID NO: 156247 - DNA, 15 bp, Homo sapiens
tgaaatcccagaaca

SEQ ID NO: 156248 - DNA, 15 bp, Homo sapiens
gaaatcccagaacat

SEQ ID NO: 156249 - DNA, 15 bp, Homo sapiens
aaatcccagaacatt

SEQ ID NO: 156250 - DNA, 15 bp, Homo sapiens
aatcccagaacatta

SEQ ID NO: 156251 - DNA, 15 bp, Homo sapiens
atcccagaacattag

SEQ ID NO: 156252 - DNA, 15 bp, Homo sapiens
tcccagaacattaga

SEQ ID NO: 156253 - DNA, 15 bp, Homo sapiens
cccagaacattagaa

SEQ ID NO: 156254 - DNA, 15 bp, Homo sapiens
ccagaacattagaat

SEQ ID NO: 156255 - DNA, 15 bp, Homo sapiens
cagaacattagaatt

SEQ ID NO: 156256 - DNA, 15 bp, Homo sapiens
agaacattagaattg

SEQ ID NO: 156257 - DNA, 15 bp, Homo sapiens
gaacattagaattgg

SEQ ID NO: 156258 - DNA, 15 bp, Homo sapiens
aacattagaattggg

SEQ ID NO: 156259 - DNA, 15 bp, Homo sapiens
acattagaattgggg

SEQ ID NO: 156260 - DNA, 15 bp, Homo sapiens
cattagaattggggg

SEQ ID NO: 156261 - DNA, 15 bp, Homo sapiens
attagaattgggggc

SEQ ID NO: 156262 - DNA, 15 bp, Homo sapiens
ttagaattgggggca

SEQ ID NO: 156263 - DNA, 15 bp, Homo sapiens
tagaattgggggcat

SEQ ID NO: 156264 - DNA, 15 bp, Homo sapiens
agaattgggggcatt

SEQ ID NO: 156265 - DNA, 15 bp, Homo sapiens
gaattgggggcatta

SEQ ID NO: 156266 - DNA, 15 bp, Homo sapiens
aattgggggcattat

SEQ ID NO: 156267 - DNA, 15 bp, Homo sapiens
attgggggcattatt

SEQ ID NO: 156268 - DNA, 15 bp, Homo sapiens
ttgggggcattattt

SEQ ID NO: 156269 - DNA, 15 bp, Homo sapiens
tgggggcattatttg

SEQ ID NO: 156270 - DNA, 15 bp, Homo sapiens
gggggcattatttga

SEQ ID NO: 156271 - DNA, 15 bp, Homo sapiens
ggggcattatttgaa

SEQ ID NO: 156272 - DNA, 15 bp, Homo sapiens
gggcattatttgaat

SEQ ID NO: 156273 - DNA, 15 bp, Homo sapiens
ggcattatttgaatc

SEQ ID NO: 156274 - DNA, 15 bp, Homo sapiens
gcattatttgaatct

SEQ ID NO: 156275 - DNA, 15 bp, Homo sapiens
cattatttgaatctt

SEQ ID NO: 156276 - DNA, 15 bp, Homo sapiens
attatttgaatcttt

SEQ ID NO: 156277 - DNA, 15 bp, Homo sapiens
ttatttgaatcttta

SEQ ID NO: 156278 - DNA, 15 bp, Homo sapiens
tatttgaatctttaa

SEQ ID NO: 156279 - DNA, 15 bp, Homo sapiens
atttgaatctttaag

SEQ ID NO: 156280 - DNA, 15 bp, Homo sapiens
tttgaatctttaagg

SEQ ID NO: 156281 - DNA, 15 bp, Homo sapiens
ttgaatctttaaggt

SEQ ID NO: 156282 - DNA, 15 bp, Homo sapiens
tgaatctttaaggtt

SEQ ID NO: 156283 - DNA, 15 bp, Homo sapiens
gaatctttaaggtta

SEQ ID NO: 156284 - DNA, 15 bp, Homo sapiens
aatctttaaggttat

SEQ ID NO: 156285 - DNA, 15 bp, Homo sapiens
atctttaaggttata

SEQ ID NO: 156286 - DNA, 15 bp, Homo sapiens
tctttaaggttataa

SEQ ID NO: 156287 - DNA, 15 bp, Homo sapiens
ctttaaggttataag

SEQ ID NO: 156288 - DNA, 15 bp, Homo sapiens
tttaaggttataagg

SEQ ID NO: 156289 - DNA, 15 bp, Homo sapiens
ttaaggttataagga

SEQ ID NO: 156290 - DNA, 15 bp, Homo sapiens
taaggttataaggaa

SEQ ID NO: 156291 - DNA, 15 bp, Homo sapiens
aaggttataaggaat

SEQ ID NO: 156292 - DNA, 15 bp, Homo sapiens
aggttataaggaata

SEQ ID NO: 156293 - DNA, 15 bp, Homo sapiens
ggttataaggaatac

SEQ ID NO: 156294 - DNA, 15 bp, Homo sapiens
gttataaggaataca

SEQ ID NO: 156295 - DNA, 15 bp, Homo sapiens
ttataaggaatacat

SEQ ID NO: 156296 - DNA, 15 bp, Homo sapiens
tataaggaatacatt

SEQ ID NO: 156297 - DNA, 15 bp, Homo sapiens
ataaggaatacattt

SEQ ID NO: 156298 - DNA, 15 bp, Homo sapiens
taaggaatacatttc

SEQ ID NO: 156299 - DNA, 15 bp, Homo sapiens
aaggaatacatttct

SEQ ID NO: 156300 - DNA, 15 bp, Homo sapiens
aggaatacatttctc

SEQ ID NO: 156301 - DNA, 15 bp, Homo sapiens
ggaatacatttctca

SEQ ID NO: 156302 - DNA, 15 bp, Homo sapiens
gaatacatttctcag

SEQ ID NO: 156303 - DNA, 15 bp, Homo sapiens
aatacatttctcagc

SEQ ID NO: 156304 - DNA, 15 bp, Homo sapiens
atacatttctcagca

SEQ ID NO: 156305 - DNA, 15 bp, Homo sapiens
tacatttctcagcaa

SEQ ID NO: 156306 - DNA, 15 bp, Homo sapiens
acatttctcagcaat

SEQ ID NO: 156307 - DNA, 15 bp, Homo sapiens
catttctcagcaata

SEQ ID NO: 156308 - DNA, 15 bp, Homo sapiens
atttctcagcaataa

SEQ ID NO: 156309 - DNA, 15 bp, Homo sapiens
tttctcagcaataaa

SEQ ID NO: 156310 - DNA, 15 bp, Homo sapiens
ttctcagcaataaat

SEQ ID NO: 156311 - DNA, 15 bp, Homo sapiens
tctcagcaataaatg

SEQ ID NO: 156312 - DNA, 15 bp, Homo sapiens
ctcagcaataaatgg

SEQ ID NO: 156313 - DNA, 15 bp, Homo sapiens
tcagcaataaatgga

SEQ ID NO: 156314 - DNA, 15 bp, Homo sapiens
cagcaataaatggaa

SEQ ID NO: 156315 - DNA, 15 bp, Homo sapiens
agcaataaatggaag

SEQ ID NO: 156316 - DNA, 15 bp, Homo sapiens
gcaataaatggaagg

SEQ ID NO: 156317 - DNA, 15 bp, Homo sapiens
caataaatggaagga

SEQ ID NO: 156318 - DNA, 15 bp, Homo sapiens
aataaatggaaggag

SEQ ID NO: 156319 - DNA, 15 bp, Homo sapiens
ataaatggaaggagt

SEQ ID NO: 156320 - DNA, 15 bp, Homo sapiens
taaatggaaggagtt

SEQ ID NO: 156321 - DNA, 15 bp, Homo sapiens
aaatggaaggagttt

SEQ ID NO: 156322 - DNA, 15 bp, Homo sapiens
aatggaaggagtttt

SEQ ID NO: 156323 - DNA, 15 bp, Homo sapiens
atggaaggagttttg

SEQ ID NO: 156324 - DNA, 15 bp, Homo sapiens
tggaaggagttttgg

SEQ ID NO: 156325 - DNA, 15 bp, Homo sapiens
ggaaggagttttggg

SEQ ID NO: 156326 - DNA, 15 bp, Homo sapiens
gaaggagttttgggt

SEQ ID NO: 156327 - DNA, 15 bp, Homo sapiens
aaggagttttgggtt

SEQ ID NO: 156328 - DNA, 15 bp, Homo sapiens
aggagttttgggtta

SEQ ID NO: 156329 - DNA, 15 bp, Homo sapiens
ggagttttgggttaa

SEQ ID NO: 156330 - DNA, 15 bp, Homo sapiens
gagttttgggttaac

SEQ ID NO: 156331 - DNA, 15 bp, Homo sapiens
agttttgggttaact

SEQ ID NO: 156332 - DNA, 15 bp, Homo sapiens
gttttgggttaactt

SEQ ID NO: 156333 - DNA, 15 bp, Homo sapiens
ttttgggttaactta

SEQ ID NO: 156334 - DNA, 15 bp, Homo sapiens
tttgggttaacttat

SEQ ID NO: 156335 - DNA, 15 bp, Homo sapiens
ttgggttaacttata

SEQ ID NO: 156336 - DNA, 15 bp, Homo sapiens
tgggttaacttataa

SEQ ID NO: 156337 - DNA, 15 bp, Homo sapiens
gggttaacttataaa

SEQ ID NO: 156338 - DNA, 15 bp, Homo sapiens
ggttaacttataaag

SEQ ID NO: 156339 - DNA, 15 bp, Homo sapiens
gttaacttataaagt

SEQ ID NO: 156340 - DNA, 15 bp, Homo sapiens
ttaacttataaagta

SEQ ID NO: 156341 - DNA, 15 bp, Homo sapiens
taacttataaagtat

SEQ ID NO: 156342 - DNA, 15 bp, Homo sapiens
aacttataaagtata

SEQ ID NO: 156343 - DNA, 15 bp, Homo sapiens
acttataaagtatac

SEQ ID NO: 156344 - DNA, 15 bp, Homo sapiens
cttataaagtatacc

SEQ ID NO: 156345 - DNA, 15 bp, Homo sapiens
ttataaagtataccc

SEQ ID NO: 156346 - DNA, 15 bp, Homo sapiens
tataaagtataccca

SEQ ID NO: 156347 - DNA, 15 bp, Homo sapiens
ataaagtatacccaa

SEQ ID NO: 156348 - DNA, 15 bp, Homo sapiens
taaagtatacccaag

SEQ ID NO: 156349 - DNA, 15 bp, Homo sapiens
aaagtatacccaagt

SEQ ID NO: 156350 - DNA, 15 bp, Homo sapiens
aagtatacccaagtc

SEQ ID NO: 156351 - DNA, 15 bp, Homo sapiens
agtatacccaagtca

SEQ ID NO: 156352 - DNA, 15 bp, Homo sapiens
gtatacccaagtcat

SEQ ID NO: 156353 - DNA, 15 bp, Homo sapiens
tatacccaagtcatt

SEQ ID NO: 156354 - DNA, 15 bp, Homo sapiens
atacccaagtcattt

SEQ ID NO: 156355 - DNA, 15 bp, Homo sapiens
tacccaagtcatttt

SEQ ID NO: 156356 - DNA, 15 bp, Homo sapiens
acccaagtcattttt

SEQ ID NO: 156357 - DNA, 15 bp, Homo sapiens
cccaagtcatttttt

SEQ ID NO: 156358 - DNA, 15 bp, Homo sapiens
ccaagtcattttttt

SEQ ID NO: 156359 - DNA, 15 bp, Homo sapiens
caagtcatttttttt

SEQ ID NO: 156360 - DNA, 15 bp, Homo sapiens
aagtcattttttttt

SEQ ID NO: 156361 - DNA, 15 bp, Homo sapiens
agtcatttttttttc

SEQ ID NO: 156362 - DNA, 15 bp, Homo sapiens
gtcatttttttttca

SEQ ID NO: 156363 - DNA, 15 bp, Homo sapiens
tcatttttttttcag

SEQ ID NO: 156364 - DNA, 15 bp, Homo sapiens
catttttttttcaga

SEQ ID NO: 156365 - DNA, 15 bp, Homo sapiens
atttttttttcagag

SEQ ID NO: 156366 - DNA, 15 bp, Homo sapiens
tttttttttcagaga

SEQ ID NO: 156367 - DNA, 15 bp, Homo sapiens
ttttttttcagagaa

SEQ ID NO: 156368 - DNA, 15 bp, Homo sapiens
tttttttcagagaag

SEQ ID NO: 156369 - DNA, 15 bp, Homo sapiens
ttttttcagagaaga

SEQ ID NO: 156370 - DNA, 15 bp, Homo sapiens
tttttcagagaagat

SEQ ID NO: 156371 - DNA, 15 bp, Homo sapiens
ttttcagagaagata

SEQ ID NO: 156372 - DNA, 15 bp, Homo sapiens
tttcagagaagatat

SEQ ID NO: 156373 - DNA, 15 bp, Homo sapiens
ttcagagaagatatg

SEQ ID NO: 156374 - DNA, 15 bp, Homo sapiens
tcagagaagatatgg

SEQ ID NO: 156375 - DNA, 15 bp, Homo sapiens
cagagaagatatggt

SEQ ID NO: 156376 - DNA, 15 bp, Homo sapiens
agagaagatatggta

SEQ ID NO: 156377 - DNA, 15 bp, Homo sapiens
gagaagatatggtag

SEQ ID NO: 156378 - DNA, 15 bp, Homo sapiens
agaagatatggtaga

SEQ ID NO: 156379 - DNA, 15 bp, Homo sapiens
gaagatatggtagaa

SEQ ID NO: 156380 - DNA, 15 bp, Homo sapiens
aagatatggtagaaa

SEQ ID NO: 156381 - DNA, 15 bp, Homo sapiens
agatatggtagaaag

SEQ ID NO: 156382 - DNA, 15 bp, Homo sapiens
gatatggtagaaagt

SEQ ID NO: 156383 - DNA, 15 bp, Homo sapiens
atatggtagaaagtc

SEQ ID NO: 156384 - DNA, 15 bp, Homo sapiens
tatggtagaaagtct

SEQ ID NO: 156385 - DNA, 15 bp, Homo sapiens
atggtagaaagtctt

SEQ ID NO: 156386 - DNA, 15 bp, Homo sapiens
tggtagaaagtctta

SEQ ID NO: 156387 - DNA, 15 bp, Homo sapiens
ggtagaaagtcttag

SEQ ID NO: 156388 - DNA, 15 bp, Homo sapiens
gtagaaagtcttagg

SEQ ID NO: 156389 - DNA, 15 bp, Homo sapiens
tagaaagtcttagga

SEQ ID NO: 156390 - DNA, 15 bp, Homo sapiens
agaaagtcttaggag

SEQ ID NO: 156391 - DNA, 15 bp, Homo sapiens
gaaagtcttaggagg

SEQ ID NO: 156392 - DNA, 15 bp, Homo sapiens
aaagtcttaggaggt

SEQ ID NO: 156393 - DNA, 15 bp, Homo sapiens
aagtcttaggaggtt

SEQ ID NO: 156394 - DNA, 15 bp, Homo sapiens
agtcttaggaggttg

SEQ ID NO: 156395 - DNA, 15 bp, Homo sapiens
gtcttaggaggttga

SEQ ID NO: 156396 - DNA, 15 bp, Homo sapiens
tcttaggaggttgaa

SEQ ID NO: 156397 - DNA, 15 bp, Homo sapiens
cttaggaggttgaag

SEQ ID NO: 156398 - DNA, 15 bp, Homo sapiens
ttaggaggttgaaga

SEQ ID NO: 156399 - DNA, 15 bp, Homo sapiens
taggaggttgaagaa

SEQ ID NO: 156400 - DNA, 15 bp, Homo sapiens
aggaggttgaagaag

SEQ ID NO: 156401 - DNA, 15 bp, Homo sapiens
ggaggttgaagaagg

SEQ ID NO: 156402 - DNA, 15 bp, Homo sapiens
gaggttgaagaagga

SEQ ID NO: 156403 - DNA, 15 bp, Homo sapiens
aggttgaagaaggaa

SEQ ID NO: 156404 - DNA, 15 bp, Homo sapiens
ggttgaagaaggaat

SEQ ID NO: 156405 - DNA, 15 bp, Homo sapiens
gttgaagaaggaatt

SEQ ID NO: 156406 - DNA, 15 bp, Homo sapiens
ttgaagaaggaattg

SEQ ID NO: 156407 - DNA, 15 bp, Homo sapiens
tgaagaaggaattgg

SEQ ID NO: 156408 - DNA, 15 bp, Homo sapiens
gaagaaggaattgga

SEQ ID NO: 156409 - DNA, 15 bp, Homo sapiens
aagaaggaattggat

SEQ ID NO: 156410 - DNA, 15 bp, Homo sapiens
agaaggaattggata

SEQ ID NO: 156411 - DNA, 15 bp, Homo sapiens
gaaggaattggatat

SEQ ID NO: 156412 - DNA, 15 bp, Homo sapiens
aaggaattggatatt

SEQ ID NO: 156413 - DNA, 15 bp, Homo sapiens
aggaattggatattt

SEQ ID NO: 156414 - DNA, 15 bp, Homo sapiens
ggaattggatattta

SEQ ID NO: 156415 - DNA, 15 bp, Homo sapiens
gaattggatatttat

SEQ ID NO: 156416 - DNA, 15 bp, Homo sapiens
aattggatatttatt

SEQ ID NO: 156417 - DNA, 15 bp, Homo sapiens
attggatatttattc

SEQ ID NO: 156418 - DNA, 15 bp, Homo sapiens
ttggatatttattct

SEQ ID NO: 156419 - DNA, 15 bp, Homo sapiens
tggatatttattctt

SEQ ID NO: 156420 - DNA, 15 bp, Homo sapiens
ggatatttattcttt

SEQ ID NO: 156421 - DNA, 15 bp, Homo sapiens
gatatttattctttc

SEQ ID NO: 156422 - DNA, 15 bp, Homo sapiens
atatttattctttct

SEQ ID NO: 156423 - DNA, 15 bp, Homo sapiens
tatttattctttctg

SEQ ID NO: 156424 - DNA, 15 bp, Homo sapiens
atttattctttctga

SEQ ID NO: 156425 - DNA, 15 bp, Homo sapiens
tttattctttctgag

SEQ ID NO: 156426 - DNA, 15 bp, Homo sapiens
ttattctttctgaga

SEQ ID NO: 156427 - DNA, 15 bp, Homo sapiens
tattctttctgagac

SEQ ID NO: 156428 - DNA, 15 bp, Homo sapiens
attctttctgagact

SEQ ID NO: 156429 - DNA, 15 bp, Homo sapiens
ttctttctgagacta

SEQ ID NO: 156430 - DNA, 15 bp, Homo sapiens
tctttctgagactat

SEQ ID NO: 156431 - DNA, 15 bp, Homo sapiens
ctttctgagactatc

SEQ ID NO: 156432 - DNA, 15 bp, Homo sapiens
tttctgagactatca

SEQ ID NO: 156433 - DNA, 15 bp, Homo sapiens
ttctgagactatcat

SEQ ID NO: 156434 - DNA, 15 bp, Homo sapiens
tctgagactatcatg

SEQ ID NO: 156435 - DNA, 15 bp, Homo sapiens
ctgagactatcatgg

SEQ ID NO: 156436 - DNA, 15 bp, Homo sapiens
tgagactatcatggg

SEQ ID NO: 156437 - DNA, 15 bp, Homo sapiens
gagactatcatggga

SEQ ID NO: 156438 - DNA, 15 bp, Homo sapiens
agactatcatgggag

SEQ ID NO: 156439 - DNA, 15 bp, Homo sapiens
gactatcatgggaga

SEQ ID NO: 156440 - DNA, 15 bp, Homo sapiens
actatcatgggagat

SEQ ID NO: 156441 - DNA, 15 bp, Homo sapiens
ctatcatgggagata

SEQ ID NO: 156442 - DNA, 15 bp, Homo sapiens
tatcatgggagataa

SEQ ID NO: 156443 - DNA, 15 bp, Homo sapiens
atcatgggagataat

SEQ ID NO: 156444 - DNA, 15 bp, Homo sapiens
tcatgggagataatg

SEQ ID NO: 156445 - DNA, 15 bp, Homo sapiens
catgggagataatga

SEQ ID NO: 156446 - DNA, 15 bp, Homo sapiens
atgggagataatgac

SEQ ID NO: 156447 - DNA, 15 bp, Homo sapiens
tgggagataatgact

SEQ ID NO: 156448 - DNA, 15 bp, Homo sapiens
gggagataatgacta

SEQ ID NO: 156449 - DNA, 15 bp, Homo sapiens
ggagataatgactat

SEQ ID NO: 156450 - DNA, 15 bp, Homo sapiens
gagataatgactatg

SEQ ID NO: 156451 - DNA, 15 bp, Homo sapiens
agataatgactatgg

SEQ ID NO: 156452 - DNA, 15 bp, Homo sapiens
gataatgactatggt

SEQ ID NO: 156453 - DNA, 15 bp, Homo sapiens
ataatgactatggtt

SEQ ID NO: 156454 - DNA, 15 bp, Homo sapiens
taatgactatggttg

SEQ ID NO: 156455 - DNA, 15 bp, Homo sapiens
aatgactatggttgt

SEQ ID NO: 156456 - DNA, 15 bp, Homo sapiens
atgactatggttgtc

SEQ ID NO: 156457 - DNA, 15 bp, Homo sapiens
tgactatggttgtcc

SEQ ID NO: 156458 - DNA, 15 bp, Homo sapiens
gactatggttgtcca

SEQ ID NO: 156459 - DNA, 15 bp, Homo sapiens
actatggttgtccat

SEQ ID NO: 156460 - DNA, 15 bp, Homo sapiens
ctatggttgtccatg

SEQ ID NO: 156461 - DNA, 15 bp, Homo sapiens
tatggttgtccatga

SEQ ID NO: 156462 - DNA, 15 bp, Homo sapiens
atggttgtccatgat

SEQ ID NO: 156463 - DNA, 15 bp, Homo sapiens
tggttgtccatgatt

SEQ ID NO: 156464 - DNA, 15 bp, Homo sapiens
ggttgtccatgattg

SEQ ID NO: 156465 - DNA, 15 bp, Homo sapiens
gttgtccatgattgg

SEQ ID NO: 156466 - DNA, 15 bp, Homo sapiens
ttgtccatgattgga

SEQ ID NO: 156467 - DNA, 15 bp, Homo sapiens
tgtccatgattggag

SEQ ID NO: 156468 - DNA, 15 bp, Homo sapiens
gtccatgattggagc

SEQ ID NO: 156469 - DNA, 15 bp, Homo sapiens
tccatgattggagcc

SEQ ID NO: 156470 - DNA, 15 bp, Homo sapiens
ccatgattggagccg

SEQ ID NO: 156471 - DNA, 15 bp, Homo sapiens
catgattggagccgt

SEQ ID NO: 156472 - DNA, 15 bp, Homo sapiens
atgattggagccgtt

SEQ ID NO: 156473 - DNA, 15 bp, Homo sapiens
tgattggagccgttg

SEQ ID NO: 156474 - DNA, 15 bp, Homo sapiens
gattggagccgttgc

SEQ ID NO: 156475 - DNA, 15 bp, Homo sapiens
attggagccgttgct

SEQ ID NO: 156476 - DNA, 15 bp, Homo sapiens
ttggagccgttgctg

SEQ ID NO: 156477 - DNA, 15 bp, Homo sapiens
tggagccgttgctgt

SEQ ID NO: 156478 - DNA, 15 bp, Homo sapiens
ggagccgttgctgta

SEQ ID NO: 156479 - DNA, 15 bp, Homo sapiens
gagccgttgctgtag

SEQ ID NO: 156480 - DNA, 15 bp, Homo sapiens
agccgttgctgtaga

SEQ ID NO: 156481 - DNA, 15 bp, Homo sapiens
gccgttgctgtagag

SEQ ID NO: 156482 - DNA, 15 bp, Homo sapiens
ccgttgctgtagagt

SEQ ID NO: 156483 - DNA, 15 bp, Homo sapiens
cgttgctgtagagtt

SEQ ID NO: 156484 - DNA, 15 bp, Homo sapiens
gttgctgtagagttg

SEQ ID NO: 156485 - DNA, 15 bp, Homo sapiens
ttgctgtagagttgg

SEQ ID NO: 156486 - DNA, 15 bp, Homo sapiens
tgctgtagagttggt

SEQ ID NO: 156487 - DNA, 15 bp, Homo sapiens
gctgtagagttggtt

SEQ ID NO: 156488 - DNA, 15 bp, Homo sapiens
ctgtagagttggttt

SEQ ID NO: 156489 - DNA, 15 bp, Homo sapiens
tgtagagttggtttt

SEQ ID NO: 156490 - DNA, 15 bp, Homo sapiens
gtagagttggtttta

SEQ ID NO: 156491 - DNA, 15 bp, Homo sapiens
tagagttggttttat

SEQ ID NO: 156492 - DNA, 15 bp, Homo sapiens
agagttggttttatt

SEQ ID NO: 156493 - DNA, 15 bp, Homo sapiens
gagttggttttatta

SEQ ID NO: 156494 - DNA, 15 bp, Homo sapiens
agttggttttattat

SEQ ID NO: 156495 - DNA, 15 bp, Homo sapiens
gttggttttattata

SEQ ID NO: 156496 - DNA, 15 bp, Homo sapiens
ttggttttattatag

SEQ ID NO: 156497 - DNA, 15 bp, Homo sapiens
tggttttattatagt

SEQ ID NO: 156498 - DNA, 15 bp, Homo sapiens
ggttttattatagtg

SEQ ID NO: 156499 - DNA, 15 bp, Homo sapiens
gttttattatagtgt

SEQ ID NO: 156500 - DNA, 15 bp, Homo sapiens
ttttattatagtgta

SEQ ID NO: 156501 - DNA, 15 bp, Homo sapiens
tttattatagtgtag

SEQ ID NO: 156502 - DNA, 15 bp, Homo sapiens
ttattatagtgtagg

SEQ ID NO: 156503 - DNA, 15 bp, Homo sapiens
tattatagtgtagga

SEQ ID NO: 156504 - DNA, 15 bp, Homo sapiens
attatagtgtaggat

SEQ ID NO: 156505 - DNA, 15 bp, Homo sapiens
ttatagtgtaggatt

SEQ ID NO: 156506 - DNA, 15 bp, Homo sapiens
tatagtgtaggattt

SEQ ID NO: 156507 - DNA, 15 bp, Homo sapiens
atagtgtaggatttg

SEQ ID NO: 156508 - DNA, 15 bp, Homo sapiens
tagtgtaggatttga

SEQ ID NO: 156509 - DNA, 15 bp, Homo sapiens
agtgtaggatttgaa

SEQ ID NO: 156510 - DNA, 15 bp, Homo sapiens
gtgtaggatttgaat

SEQ ID NO: 156511 - DNA, 15 bp, Homo sapiens
tgtaggatttgaatg

SEQ ID NO: 156512 - DNA, 15 bp, Homo sapiens
gtaggatttgaatgg

SEQ ID NO: 156513 - DNA, 15 bp, Homo sapiens
taggatttgaatggg

SEQ ID NO: 156514 - DNA, 15 bp, Homo sapiens
aggatttgaatgggc

SEQ ID NO: 156515 - DNA, 15 bp, Homo sapiens
ggatttgaatgggcc

SEQ ID NO: 156516 - DNA, 15 bp, Homo sapiens
gatttgaatgggcca

SEQ ID NO: 156517 - DNA, 15 bp, Homo sapiens
atttgaatgggccat

SEQ ID NO: 156518 - DNA, 15 bp, Homo sapiens
tttgaatgggccatg

SEQ ID NO: 156519 - DNA, 15 bp, Homo sapiens
ttgaatgggccatgt

SEQ ID NO: 156520 - DNA, 15 bp, Homo sapiens
tgaatgggccatgtg

SEQ ID NO: 156521 - DNA, 15 bp, Homo sapiens
gaatgggccatgtgt

SEQ ID NO: 156522 - DNA, 15 bp, Homo sapiens
aatgggccatgtgtt

SEQ ID NO: 156523 - DNA, 15 bp, Homo sapiens
atgggccatgtgttc

SEQ ID NO: 156524 - DNA, 15 bp, Homo sapiens
tgggccatgtgttct

SEQ ID NO: 156525 - DNA, 15 bp, Homo sapiens
gggccatgtgttctc

SEQ ID NO: 156526 - DNA, 15 bp, Homo sapiens
ggccatgtgttctca

SEQ ID NO: 156527 - DNA, 15 bp, Homo sapiens
gccatgtgttctcag

SEQ ID NO: 156528 - DNA, 15 bp, Homo sapiens
ccatgtgttctcaga

SEQ ID NO: 156529 - DNA, 15 bp, Homo sapiens
catgtgttctcagac

SEQ ID NO: 156530 - DNA, 15 bp, Homo sapiens
atgtgttctcagacc

SEQ ID NO: 156531 - DNA, 15 bp, Homo sapiens
tgtgttctcagacct

SEQ ID NO: 156532 - DNA, 15 bp, Homo sapiens
gtgttctcagacctc

SEQ ID NO: 156533 - DNA, 15 bp, Homo sapiens
tgttctcagacctca

SEQ ID NO: 156534 - DNA, 15 bp, Homo sapiens
gttctcagacctcag

SEQ ID NO: 156535 - DNA, 15 bp, Homo sapiens
ttctcagacctcaga

SEQ ID NO: 156536 - DNA, 15 bp, Homo sapiens
tctcagacctcagat

SEQ ID NO: 156537 - DNA, 15 bp, Homo sapiens
ctcagacctcagatt

SEQ ID NO: 156538 - DNA, 15 bp, Homo sapiens
tcagacctcagatta

SEQ ID NO: 156539 - DNA, 15 bp, Homo sapiens
cagacctcagattaa

SEQ ID NO: 156540 - DNA, 15 bp, Homo sapiens
agacctcagattaaa

SEQ ID NO: 156541 - DNA, 15 bp, Homo sapiens
gacctcagattaaaa

SEQ ID NO: 156542 - DNA, 15 bp, Homo sapiens
acctcagattaaaat

SEQ ID NO: 156543 - DNA, 15 bp, Homo sapiens
cctcagattaaaatg

SEQ ID NO: 156544 - DNA, 15 bp, Homo sapiens
ctcagattaaaatga

SEQ ID NO: 156545 - DNA, 15 bp, Homo sapiens
tcagattaaaatgag

SEQ ID NO: 156546 - DNA, 15 bp, Homo sapiens
cagattaaaatgaga

SEQ ID NO: 156547 - DNA, 15 bp, Homo sapiens
agattaaaatgagaa

SEQ ID NO: 156548 - DNA, 15 bp, Homo sapiens
gattaaaatgagaaa

SEQ ID NO: 156549 - DNA, 15 bp, Homo sapiens
attaaaatgagaaaa

SEQ ID NO: 156550 - DNA, 15 bp, Homo sapiens
ttaaaatgagaaaac

SEQ ID NO: 156551 - DNA, 15 bp, Homo sapiens
taaaatgagaaaact

SEQ ID NO: 156552 - DNA, 15 bp, Homo sapiens
aaaatgagaaaactg

SEQ ID NO: 156553 - DNA, 15 bp, Homo sapiens
aaatgagaaaactga

SEQ ID NO: 156554 - DNA, 15 bp, Homo sapiens
aatgagaaaactgag

SEQ ID NO: 156555 - DNA, 15 bp, Homo sapiens
tgagaaaactgaggc

SEQ ID NO: 156556 - DNA, 15 bp, Homo sapiens
gagaaaactgaggcc

SEQ ID NO: 156557 - DNA, 15 bp, Homo sapiens
agaaaactgaggcca

SEQ ID NO: 156558 - DNA, 15 bp, Homo sapiens
gaaaactgaggccag

SEQ ID NO: 156559 - DNA, 15 bp, Homo sapiens
aaaactgaggccagt

SEQ ID NO: 156560 - DNA, 15 bp, Homo sapiens
aaactgaggccagtg

SEQ ID NO: 156561 - DNA, 15 bp, Homo sapiens
aactgaggccagtgg

SEQ ID NO: 156562 - DNA, 15 bp, Homo sapiens
actgaggccagtggg

SEQ ID NO: 156563 - DNA, 15 bp, Homo sapiens
ctgaggccagtgggg

SEQ ID NO: 156564 - DNA, 15 bp, Homo sapiens
tgaggccagtgggga

SEQ ID NO: 156565 - DNA, 15 bp, Homo sapiens
gaggccagtggggag

SEQ ID NO: 156566 - DNA, 15 bp, Homo sapiens
aggccagtggggagc

SEQ ID NO: 156567 - DNA, 15 bp, Homo sapiens
ggccagtggggagcg

SEQ ID NO: 156568 - DNA, 15 bp, Homo sapiens
gccagtggggagcgt

SEQ ID NO: 156569 - DNA, 15 bp, Homo sapiens
ccagtggggagcgtg

SEQ ID NO: 156570 - DNA, 15 bp, Homo sapiens
cagtggggagcgtga

SEQ ID NO: 156571 - DNA, 15 bp, Homo sapiens
agtggggagcgtgac

SEQ ID NO: 156572 - DNA, 15 bp, Homo sapiens
gtggggagcgtgact

SEQ ID NO: 156573 - DNA, 15 bp, Homo sapiens
tggggagcgtgactt

SEQ ID NO: 156574 - DNA, 15 bp, Homo sapiens
ggggagcgtgacttc

SEQ ID NO: 156575 - DNA, 15 bp, Homo sapiens
gggagcgtgacttca

SEQ ID NO: 156576 - DNA, 15 bp, Homo sapiens
ggagcgtgacttcac

SEQ ID NO: 156577 - DNA, 15 bp, Homo sapiens
gagcgtgacttcaca

SEQ ID NO: 156578 - DNA, 15 bp, Homo sapiens
agcgtgacttcacat

SEQ ID NO: 156579 - DNA, 15 bp, Homo sapiens
gcgtgacttcacatg

SEQ ID NO: 156580 - DNA, 15 bp, Homo sapiens
cgtgacttcacatgg

SEQ ID NO: 156581 - DNA, 15 bp, Homo sapiens
gtgacttcacatggg

SEQ ID NO: 156582 - DNA, 15 bp, Homo sapiens
tgacttcacatgggt

SEQ ID NO: 156583 - DNA, 15 bp, Homo sapiens
gacttcacatgggta

SEQ ID NO: 156584 - DNA, 15 bp, Homo sapiens
acttcacatgggtac

SEQ ID NO: 156585 - DNA, 15 bp, Homo sapiens
cttcacatgggtaca

SEQ ID NO: 156586 - DNA, 15 bp, Homo sapiens
ttcacatgggtacac

SEQ ID NO: 156587 - DNA, 15 bp, Homo sapiens
tcacatgggtacact

SEQ ID NO: 156588 - DNA, 15 bp, Homo sapiens
cacatgggtacactt

SEQ ID NO: 156589 - DNA, 15 bp, Homo sapiens
acatgggtacacttg

SEQ ID NO: 156590 - DNA, 15 bp, Homo sapiens
catgggtacacttgt

SEQ ID NO: 156591 - DNA, 15 bp, Homo sapiens
atgggtacacttgtg

SEQ ID NO: 156592 - DNA, 15 bp, Homo sapiens
tgggtacacttgtgc

SEQ ID NO: 156593 - DNA, 15 bp, Homo sapiens
gggtacacttgtgct

SEQ ID NO: 156594 - DNA, 15 bp, Homo sapiens
ggtacacttgtgcta

SEQ ID NO: 156595 - DNA, 15 bp, Homo sapiens
gtacacttgtgctag

SEQ ID NO: 156596 - DNA, 15 bp, Homo sapiens
tacacttgtgctaga

SEQ ID NO: 156597 - DNA, 15 bp, Homo sapiens
acacttgtgctagag

SEQ ID NO: 156598 - DNA, 15 bp, Homo sapiens
cacttgtgctagaga

SEQ ID NO: 156599 - DNA, 15 bp, Homo sapiens
acttgtgctagagac

SEQ ID NO: 156600 - DNA, 15 bp, Homo sapiens
cttgtgctagagaca

SEQ ID NO: 156601 - DNA, 15 bp, Homo sapiens
ttgtgctagagacag

SEQ ID NO: 156602 - DNA, 15 bp, Homo sapiens
tgtgctagagacaga

SEQ ID NO: 156603 - DNA, 15 bp, Homo sapiens
gtgctagagacagaa

SEQ ID NO: 156604 - DNA, 15 bp, Homo sapiens
tgctagagacagaac

SEQ ID NO: 156605 - DNA, 15 bp, Homo sapiens
gctagagacagaacc

SEQ ID NO: 156606 - DNA, 15 bp, Homo sapiens
ctagagacagaacca

SEQ ID NO: 156607 - DNA, 15 bp, Homo sapiens
tagagacagaaccag

SEQ ID NO: 156608 - DNA, 15 bp, Homo sapiens
agagacagaaccagg

SEQ ID NO: 156609 - DNA, 15 bp, Homo sapiens
gagacagaaccagga

SEQ ID NO: 156610 - DNA, 15 bp, Homo sapiens
agacagaaccaggat

SEQ ID NO: 156611 - DNA, 15 bp, Homo sapiens
gacagaaccaggatt

SEQ ID NO: 156612 - DNA, 15 bp, Homo sapiens
acagaaccaggattc

SEQ ID NO: 156613 - DNA, 15 bp, Homo sapiens
cagaaccaggattca

SEQ ID NO: 156614 - DNA, 15 bp, Homo sapiens
agaaccaggattcag

SEQ ID NO: 156615 - DNA, 15 bp, Homo sapiens
gaaccaggattcagg

SEQ ID NO: 156616 - DNA, 15 bp, Homo sapiens
aaccaggattcagga

SEQ ID NO: 156617 - DNA, 15 bp, Homo sapiens
accaggattcaggac

SEQ ID NO: 156618 - DNA, 15 bp, Homo sapiens
ccaggattcaggact

SEQ ID NO: 156619 - DNA, 15 bp, Homo sapiens
caggattcaggactt

SEQ ID NO: 156620 - DNA, 15 bp, Homo sapiens
aggattcaggacttc

SEQ ID NO: 156621 - DNA, 15 bp, Homo sapiens
ggattcaggacttct

SEQ ID NO: 156622 - DNA, 15 bp, Homo sapiens
gattcaggacttctg

SEQ ID NO: 156623 - DNA, 15 bp, Homo sapiens
attcaggacttctgg

SEQ ID NO: 156624 - DNA, 15 bp, Homo sapiens
ttcaggacttctggc

SEQ ID NO: 156625 - DNA, 15 bp, Homo sapiens
tcaggacttctggct

SEQ ID NO: 156626 - DNA, 15 bp, Homo sapiens
caggacttctggctc

SEQ ID NO: 156627 - DNA, 15 bp, Homo sapiens
aggacttctggctcc

SEQ ID NO: 156628 - DNA, 15 bp, Homo sapiens
ggacttctggctcct

SEQ ID NO: 156629 - DNA, 15 bp, Homo sapiens
gacttctggctcctg

SEQ ID NO: 156630 - DNA, 15 bp, Homo sapiens
acttctggctcctgg

SEQ ID NO: 156631 - DNA, 15 bp, Homo sapiens
cttctggctcctggt

SEQ ID NO: 156632 - DNA, 15 bp, Homo sapiens
ttctggctcctggtc

SEQ ID NO: 156633 - DNA, 15 bp, Homo sapiens
tctggctcctggtcc

SEQ ID NO: 156634 - DNA, 15 bp, Homo sapiens
ctggctcctggtcct

SEQ ID NO: 156635 - DNA, 15 bp, Homo sapiens
tggctcctggtcctg

SEQ ID NO: 156636 - DNA, 15 bp, Homo sapiens
ggctcctggtcctgg

SEQ ID NO: 156637 - DNA, 15 bp, Homo sapiens
gctcctggtcctggg

SEQ ID NO: 156638 - DNA, 15 bp, Homo sapiens
ctcctggtcctgggt

SEQ ID NO: 156639 - DNA, 15 bp, Homo sapiens
tcctggtcctgggtt

SEQ ID NO: 156640 - DNA, 15 bp, Homo sapiens
cctggtcctgggttc

SEQ ID NO: 156641 - DNA, 15 bp, Homo sapiens
ctggtcctgggttca

SEQ ID NO: 156642 - DNA, 15 bp, Homo sapiens
tggtcctgggttcat

SEQ ID NO: 156643 - DNA, 15 bp, Homo sapiens
ggtcctgggttcatg

SEQ ID NO: 156644 - DNA, 15 bp, Homo sapiens
gtcctgggttcatgg

SEQ ID NO: 156645 - DNA, 15 bp, Homo sapiens
tcctgggttcatggc

SEQ ID NO: 156646 - DNA, 15 bp, Homo sapiens
cctgggttcatggcc

SEQ ID NO: 156647 - DNA, 15 bp, Homo sapiens
ctgggttcatggccc

SEQ ID NO: 156648 - DNA, 15 bp, Homo sapiens
tgggttcatggccca

SEQ ID NO: 156649 - DNA, 15 bp, Homo sapiens
gggttcatggcccaa

SEQ ID NO: 156650 - DNA, 15 bp, Homo sapiens
ggttcatggcccaat

SEQ ID NO: 156651 - DNA, 15 bp, Homo sapiens
gttcatggcccaatg

SEQ ID NO: 156652 - DNA, 15 bp, Homo sapiens
ttcatggcccaatgt

SEQ ID NO: 156653 - DNA, 15 bp, Homo sapiens
tcatggcccaatgta

SEQ ID NO: 156654 - DNA, 15 bp, Homo sapiens
catggcccaatgtag

SEQ ID NO: 156655 - DNA, 15 bp, Homo sapiens
atggcccaatgtagt

SEQ ID NO: 156656 - DNA, 15 bp, Homo sapiens
tggcccaatgtagtc

SEQ ID NO: 156657 - DNA, 15 bp, Homo sapiens
ggcccaatgtagtct

SEQ ID NO: 156658 - DNA, 15 bp, Homo sapiens
gcccaatgtagtctt

SEQ ID NO: 156659 - DNA, 15 bp, Homo sapiens
cccaatgtagtcttt

SEQ ID NO: 156660 - DNA, 15 bp, Homo sapiens
ccaatgtagtctttc

SEQ ID NO: 156661 - DNA, 15 bp, Homo sapiens
caatgtagtctttct

SEQ ID NO: 156662 - DNA, 15 bp, Homo sapiens
aatgtagtctttctc

SEQ ID NO: 156663 - DNA, 15 bp, Homo sapiens
atgtagtctttctca

SEQ ID NO: 156664 - DNA, 15 bp, Homo sapiens
tgtagtctttctcag

SEQ ID NO: 156665 - DNA, 15 bp, Homo sapiens
gtagtctttctcagt

SEQ ID NO: 156666 - DNA, 15 bp, Homo sapiens
tagtctttctcagtc

SEQ ID NO: 156667 - DNA, 15 bp, Homo sapiens
agtctttctcagtct

SEQ ID NO: 156668 - DNA, 15 bp, Homo sapiens
gtctttctcagtctt

SEQ ID NO: 156669 - DNA, 15 bp, Homo sapiens
tctttctcagtcttc

SEQ ID NO: 156670 - DNA, 15 bp, Homo sapiens
ctttctcagtcttca

SEQ ID NO: 156671 - DNA, 15 bp, Homo sapiens
tttctcagtcttcag

SEQ ID NO: 156672 - DNA, 15 bp, Homo sapiens
ttctcagtcttcagg

SEQ ID NO: 156673 - DNA, 15 bp, Homo sapiens
tctcagtcttcagga

SEQ ID NO: 156674 - DNA, 15 bp, Homo sapiens
ctcagtcttcaggag

SEQ ID NO: 156675 - DNA, 15 bp, Homo sapiens
tcagtcttcaggagg

SEQ ID NO: 156676 - DNA, 15 bp, Homo sapiens
cagtcttcaggagga

SEQ ID NO: 156677 - DNA, 15 bp, Homo sapiens
agtcttcaggaggag

SEQ ID NO: 156678 - DNA, 15 bp, Homo sapiens
gtcttcaggaggagg

SEQ ID NO: 156679 - DNA, 15 bp, Homo sapiens
tcttcaggaggagga

SEQ ID NO: 156680 - DNA, 15 bp, Homo sapiens
cttcaggaggaggaa

SEQ ID NO: 156681 - DNA, 15 bp, Homo sapiens
ttcaggaggaggaag

SEQ ID NO: 156682 - DNA, 15 bp, Homo sapiens
tcaggaggaggaagg

SEQ ID NO: 156683 - DNA, 15 bp, Homo sapiens
caggaggaggaaggg

SEQ ID NO: 156684 - DNA, 15 bp, Homo sapiens
aggaggaggaagggc

SEQ ID NO: 156685 - DNA, 15 bp, Homo sapiens
ggaggaggaagggca

SEQ ID NO: 156686 - DNA, 15 bp, Homo sapiens
gaggaggaagggcag

SEQ ID NO: 156687 - DNA, 15 bp, Homo sapiens
aggaggaagggcagg

SEQ ID NO: 156688 - DNA, 15 bp, Homo sapiens
ggaggaagggcagga

SEQ ID NO: 156689 - DNA, 15 bp, Homo sapiens
gaggaagggcaggac

SEQ ID NO: 156690 - DNA, 15 bp, Homo sapiens
aggaagggcaggacc

SEQ ID NO: 156691 - DNA, 15 bp, Homo sapiens
ggaagggcaggaccc

SEQ ID NO: 156692 - DNA, 15 bp, Homo sapiens
gaagggcaggaccca

SEQ ID NO: 156693 - DNA, 15 bp, Homo sapiens
aagggcaggacccag

SEQ ID NO: 156694 - DNA, 15 bp, Homo sapiens
agggcaggacccagt

SEQ ID NO: 156695 - DNA, 15 bp, Homo sapiens
gggcaggacccagtg

SEQ ID NO: 156696 - DNA, 15 bp, Homo sapiens
ggcaggacccagtgt

SEQ ID NO: 156697 - DNA, 15 bp, Homo sapiens
gcaggacccagtgtt

SEQ ID NO: 156698 - DNA, 15 bp, Homo sapiens
caggacccagtgttc

SEQ ID NO: 156699 - DNA, 15 bp, Homo sapiens
aggacccagtgttct

SEQ ID NO: 156700 - DNA, 15 bp, Homo sapiens
ggacccagtgttctg

SEQ ID NO: 156701 - DNA, 15 bp, Homo sapiens
gacccagtgttctga

SEQ ID NO: 156702 - DNA, 15 bp, Homo sapiens
acccagtgttctgag

SEQ ID NO: 156703 - DNA, 15 bp, Homo sapiens
cccagtgttctgagt

SEQ ID NO: 156704 - DNA, 15 bp, Homo sapiens
ccagtgttctgagtc

SEQ ID NO: 156705 - DNA, 15 bp, Homo sapiens
cagtgttctgagtca

SEQ ID NO: 156706 - DNA, 15 bp, Homo sapiens
agtgttctgagtcac

SEQ ID NO: 156707 - DNA, 15 bp, Homo sapiens
gtgttctgagtcacc

SEQ ID NO: 156708 - DNA, 15 bp, Homo sapiens
tgttctgagtcaccc

SEQ ID NO: 156709 - DNA, 15 bp, Homo sapiens
gttctgagtcaccct

SEQ ID NO: 156710 - DNA, 15 bp, Homo sapiens
ttctgagtcaccctg

SEQ ID NO: 156711 - DNA, 15 bp, Homo sapiens
tctgagtcaccctga

SEQ ID NO: 156712 - DNA, 15 bp, Homo sapiens
ctgagtcaccctgaa

SEQ ID NO: 156713 - DNA, 15 bp, Homo sapiens
tgagtcaccctgaat

SEQ ID NO: 156714 - DNA, 15 bp, Homo sapiens
gagtcaccctgaatg

SEQ ID NO: 156715 - DNA, 15 bp, Homo sapiens
agtcaccctgaatgt

SEQ ID NO: 156716 - DNA, 15 bp, Homo sapiens
gtcaccctgaatgtg

SEQ ID NO: 156717 - DNA, 15 bp, Homo sapiens
tcaccctgaatgtga

SEQ ID NO: 156718 - DNA, 15 bp, Homo sapiens
caccctgaatgtgag

SEQ ID NO: 156719 - DNA, 15 bp, Homo sapiens
accctgaatgtgagc

SEQ ID NO: 156720 - DNA, 15 bp, Homo sapiens
ccctgaatgtgagca

SEQ ID NO: 156721 - DNA, 15 bp, Homo sapiens
cctgaatgtgagcac

SEQ ID NO: 156722 - DNA, 15 bp, Homo sapiens
ctgaatgtgagcact

SEQ ID NO: 156723 - DNA, 15 bp, Homo sapiens
tgaatgtgagcacta

SEQ ID NO: 156724 - DNA, 15 bp, Homo sapiens
gaatgtgagcactat

SEQ ID NO: 156725 - DNA, 15 bp, Homo sapiens
aatgtgagcactatt

SEQ ID NO: 156726 - DNA, 15 bp, Homo sapiens
atgtgagcactattt

SEQ ID NO: 156727 - DNA, 15 bp, Homo sapiens
tgtgagcactattta

SEQ ID NO: 156728 - DNA, 15 bp, Homo sapiens
gtgagcactatttac

SEQ ID NO: 156729 - DNA, 15 bp, Homo sapiens
tgagcactatttact

SEQ ID NO: 156730 - DNA, 15 bp, Homo sapiens
gagcactatttactt

SEQ ID NO: 156731 - DNA, 15 bp, Homo sapiens
agcactatttacttc

SEQ ID NO: 156732 - DNA, 15 bp, Homo sapiens
gcactatttacttcg

SEQ ID NO: 156733 - DNA, 15 bp, Homo sapiens
cactatttacttcgt

SEQ ID NO: 156734 - DNA, 15 bp, Homo sapiens
actatttacttcgtg

SEQ ID NO: 156735 - DNA, 15 bp, Homo sapiens
ctatttacttcgtga

SEQ ID NO: 156736 - DNA, 15 bp, Homo sapiens
tatttacttcgtgaa

SEQ ID NO: 156737 - DNA, 15 bp, Homo sapiens
atttacttcgtgaac

SEQ ID NO: 156738 - DNA, 15 bp, Homo sapiens
tttacttcgtgaact

SEQ ID NO: 156739 - DNA, 15 bp, Homo sapiens
ttacttcgtgaactt

SEQ ID NO: 156740 - DNA, 15 bp, Homo sapiens
tacttcgtgaacttc

SEQ ID NO: 156741 - DNA, 15 bp, Homo sapiens
acttcgtgaacttct

SEQ ID NO: 156742 - DNA, 15 bp, Homo sapiens
cttcgtgaacttctt

SEQ ID NO: 156743 - DNA, 15 bp, Homo sapiens
ttcgtgaacttcttg

SEQ ID NO: 156744 - DNA, 15 bp, Homo sapiens
tcgtgaacttcttgg

SEQ ID NO: 156745 - DNA, 15 bp, Homo sapiens
cgtgaacttcttggc

SEQ ID NO: 156746 - DNA, 15 bp, Homo sapiens
gtgaacttcttggct

SEQ ID NO: 156747 - DNA, 15 bp, Homo sapiens
tgaacttcttggctt

SEQ ID NO: 156748 - DNA, 15 bp, Homo sapiens
gaacttcttggctta

SEQ ID NO: 156749 - DNA, 15 bp, Homo sapiens
aacttcttggcttag

SEQ ID NO: 156750 - DNA, 15 bp, Homo sapiens
acttcttggcttagt

SEQ ID NO: 156751 - DNA, 15 bp, Homo sapiens
cttcttggcttagtg

SEQ ID NO: 156752 - DNA, 15 bp, Homo sapiens
ttcttggcttagtgc

SEQ ID NO: 156753 - DNA, 15 bp, Homo sapiens
tcttggcttagtgcc

SEQ ID NO: 156754 - DNA, 15 bp, Homo sapiens
cttggcttagtgcct

SEQ ID NO: 156755 - DNA, 15 bp, Homo sapiens
ttggcttagtgcctc

SEQ ID NO: 156756 - DNA, 15 bp, Homo sapiens
tggcttagtgcctct

SEQ ID NO: 156757 - DNA, 15 bp, Homo sapiens
ggcttagtgcctctg

SEQ ID NO: 156758 - DNA, 15 bp, Homo sapiens
gcttagtgcctctgc

SEQ ID NO: 156759 - DNA, 15 bp, Homo sapiens
cttagtgcctctgcc

SEQ ID NO: 156760 - DNA, 15 bp, Homo sapiens
ttagtgcctctgcca

SEQ ID NO: 156761 - DNA, 15 bp, Homo sapiens
tagtgcctctgccag

SEQ ID NO: 156762 - DNA, 15 bp, Homo sapiens
agtgcctctgccagg

SEQ ID NO: 156763 - DNA, 15 bp, Homo sapiens
gtgcctctgccaggt

SEQ ID NO: 156764 - DNA, 15 bp, Homo sapiens
tgcctctgccaggtg

SEQ ID NO: 156765 - DNA, 15 bp, Homo sapiens
gcctctgccaggtgg

SEQ ID NO: 156766 - DNA, 15 bp, Homo sapiens
cctctgccaggtggc

SEQ ID NO: 156767 - DNA, 15 bp, Homo sapiens
ctctgccaggtggcc

SEQ ID NO: 156768 - DNA, 15 bp, Homo sapiens
tctgccaggtggcca

SEQ ID NO: 156769 - DNA, 15 bp, Homo sapiens
ctgccaggtggccat

SEQ ID NO: 156770 - DNA, 15 bp, Homo sapiens
tgccaggtggccata

SEQ ID NO: 156771 - DNA, 15 bp, Homo sapiens
gccaggtggccataa

SEQ ID NO: 156772 - DNA, 15 bp, Homo sapiens
ccaggtggccataac

SEQ ID NO: 156773 - DNA, 15 bp, Homo sapiens
caggtggccataacc

SEQ ID NO: 156774 - DNA, 15 bp, Homo sapiens
aggtggccataacct

SEQ ID NO: 156775 - DNA, 15 bp, Homo sapiens
ggtggccataacctc

SEQ ID NO: 156776 - DNA, 15 bp, Homo sapiens
gtggccataacctct

SEQ ID NO: 156777 - DNA, 15 bp, Homo sapiens
tggccataacctctg

SEQ ID NO: 156778 - DNA, 15 bp, Homo sapiens
ggccataacctctgg

SEQ ID NO: 156779 - DNA, 15 bp, Homo sapiens
gccataacctctggc

SEQ ID NO: 156780 - DNA, 15 bp, Homo sapiens
ccataacctctggcc

SEQ ID NO: 156781 - DNA, 15 bp, Homo sapiens
cataacctctggcct

SEQ ID NO: 156782 - DNA, 15 bp, Homo sapiens
ataacctctggcctt

SEQ ID NO: 156783 - DNA, 15 bp, Homo sapiens
taacctctggccttg

SEQ ID NO: 156784 - DNA, 15 bp, Homo sapiens
aacctctggccttgt

SEQ ID NO: 156785 - DNA, 15 bp, Homo sapiens
acctctggccttgtg

SEQ ID NO: 156786 - DNA, 15 bp, Homo sapiens
cctctggccttgtgt

SEQ ID NO: 156787 - DNA, 15 bp, Homo sapiens
ctctggccttgtgtt

SEQ ID NO: 156788 - DNA, 15 bp, Homo sapiens
tctggccttgtgttg

SEQ ID NO: 156789 - DNA, 15 bp, Homo sapiens
ctggccttgtgttgc

SEQ ID NO: 156790 - DNA, 15 bp, Homo sapiens
tggccttgtgttgcc

SEQ ID NO: 156791 - DNA, 15 bp, Homo sapiens
ggccttgtgttgcca

SEQ ID NO: 156792 - DNA, 15 bp, Homo sapiens
gccttgtgttgccag

SEQ ID NO: 156793 - DNA, 15 bp, Homo sapiens
ccttgtgttgccaga

SEQ ID NO: 156794 - DNA, 15 bp, Homo sapiens
cttgtgttgccagag

SEQ ID NO: 156795 - DNA, 15 bp, Homo sapiens
ttgtgttgccagaga

SEQ ID NO: 156796 - DNA, 15 bp, Homo sapiens
tgtgttgccagagaa

SEQ ID NO: 156797 - DNA, 15 bp, Homo sapiens
gtgttgccagagaaa

SEQ ID NO: 156798 - DNA, 15 bp, Homo sapiens
tgttgccagagaaaa

SEQ ID NO: 156799 - DNA, 15 bp, Homo sapiens
gttgccagagaaaag

SEQ ID NO: 156800 - DNA, 15 bp, Homo sapiens
ttgccagagaaaagg

SEQ ID NO: 156801 - DNA, 15 bp, Homo sapiens
tgccagagaaaaggt

SEQ ID NO: 156802 - DNA, 15 bp, Homo sapiens
gccagagaaaaggtt

SEQ ID NO: 156803 - DNA, 15 bp, Homo sapiens
ccagagaaaaggttt

SEQ ID NO: 156804 - DNA, 15 bp, Homo sapiens
cagagaaaaggttta

SEQ ID NO: 156805 - DNA, 15 bp, Homo sapiens
agagaaaaggtttag

SEQ ID NO: 156806 - DNA, 15 bp, Homo sapiens
gagaaaaggtttagt

SEQ ID NO: 156807 - DNA, 15 bp, Homo sapiens
agaaaaggtttagtt

SEQ ID NO: 156808 - DNA, 15 bp, Homo sapiens
gaaaaggtttagttt

SEQ ID NO: 156809 - DNA, 15 bp, Homo sapiens
aaaaggtttagtttt

SEQ ID NO: 156810 - DNA, 15 bp, Homo sapiens
aaaggtttagttttc

SEQ ID NO: 156811 - DNA, 15 bp, Homo sapiens
aaggtttagttttca

SEQ ID NO: 156812 - DNA, 15 bp, Homo sapiens
aggtttagttttcag

SEQ ID NO: 156813 - DNA, 15 bp, Homo sapiens
ggtttagttttcagg

SEQ ID NO: 156814 - DNA, 15 bp, Homo sapiens
gtttagttttcaggc

SEQ ID NO: 156815 - DNA, 15 bp, Homo sapiens
tttagttttcaggct

SEQ ID NO: 156816 - DNA, 15 bp, Homo sapiens
ttagttttcaggctc

SEQ ID NO: 156817 - DNA, 15 bp, Homo sapiens
tagttttcaggctcc

SEQ ID NO: 156818 - DNA, 15 bp, Homo sapiens
agttttcaggctcca

SEQ ID NO: 156819 - DNA, 15 bp, Homo sapiens
gttttcaggctccat

SEQ ID NO: 156820 - DNA, 15 bp, Homo sapiens
ttttcaggctccatt

SEQ ID NO: 156821 - DNA, 15 bp, Homo sapiens
tttcaggctccattg

SEQ ID NO: 156822 - DNA, 15 bp, Homo sapiens
ttcaggctccattgc

SEQ ID NO: 156823 - DNA, 15 bp, Homo sapiens
tcaggctccattgct

SEQ ID NO: 156824 - DNA, 15 bp, Homo sapiens
caggctccattgctt

SEQ ID NO: 156825 - DNA, 15 bp, Homo sapiens
aggctccattgcttc

SEQ ID NO: 156826 - DNA, 15 bp, Homo sapiens
ggctccattgcttcc

SEQ ID NO: 156827 - DNA, 15 bp, Homo sapiens
gctccattgcttccc

SEQ ID NO: 156828 - DNA, 15 bp, Homo sapiens
ctccattgcttccca

SEQ ID NO: 156829 - DNA, 15 bp, Homo sapiens
tccattgcttcccag

SEQ ID NO: 156830 - DNA, 15 bp, Homo sapiens
ccattgcttcccagc

SEQ ID NO: 156831 - DNA, 15 bp, Homo sapiens
cattgcttcccagct

SEQ ID NO: 156832 - DNA, 15 bp, Homo sapiens
attgcttcccagctg

SEQ ID NO: 156833 - DNA, 15 bp, Homo sapiens
ttgcttcccagctgc

SEQ ID NO: 156834 - DNA, 15 bp, Homo sapiens
tgcttcccagctgcc

SEQ ID NO: 156835 - DNA, 15 bp, Homo sapiens
gcttcccagctgcca

SEQ ID NO: 156836 - DNA, 15 bp, Homo sapiens
cttcccagctgccaa

SEQ ID NO: 156837 - DNA, 15 bp, Homo sapiens
ttcccagctgccaag

SEQ ID NO: 156838 - DNA, 15 bp, Homo sapiens
tcccagctgccaaga

SEQ ID NO: 156839 - DNA, 15 bp, Homo sapiens
cccagctgccaagaa

SEQ ID NO: 156840 - DNA, 15 bp, Homo sapiens
ccagctgccaagaat

SEQ ID NO: 156841 - DNA, 15 bp, Homo sapiens
cagctgccaagaatg

SEQ ID NO: 156842 - DNA, 15 bp, Homo sapiens
agctgccaagaatgc

SEQ ID NO: 156843 - DNA, 15 bp, Homo sapiens
gctgccaagaatgcc

SEQ ID NO: 156844 - DNA, 15 bp, Homo sapiens
ctgccaagaatgcct

SEQ ID NO: 156845 - DNA, 15 bp, Homo sapiens
tgccaagaatgcctt

SEQ ID NO: 156846 - DNA, 15 bp, Homo sapiens
gccaagaatgccttg

SEQ ID NO: 156847 - DNA, 15 bp, Homo sapiens
ccaagaatgccttgg

SEQ ID NO: 156848 - DNA, 15 bp, Homo sapiens
caagaatgccttggt

SEQ ID NO: 156849 - DNA, 15 bp, Homo sapiens
aagaatgccttggtg

SEQ ID NO: 156850 - DNA, 15 bp, Homo sapiens
agaatgccttggtgc

SEQ ID NO: 156851 - DNA, 15 bp, Homo sapiens
gaatgccttggtgca

SEQ ID NO: 156852 - DNA, 15 bp, Homo sapiens
aatgccttggtgcag

SEQ ID NO: 156853 - DNA, 15 bp, Homo sapiens
atgccttggtgcagc

SEQ ID NO: 156854 - DNA, 15 bp, Homo sapiens
tgccttggtgcagca

SEQ ID NO: 156855 - DNA, 15 bp, Homo sapiens
gccttggtgcagcac

SEQ ID NO: 156856 - DNA, 15 bp, Homo sapiens
ccttggtgcagcaca

SEQ ID NO: 156857 - DNA, 15 bp, Homo sapiens
cttggtgcagcacag

SEQ ID NO: 156858 - DNA, 15 bp, Homo sapiens
ttggtgcagcacagt

SEQ ID NO: 156859 - DNA, 15 bp, Homo sapiens
tggtgcagcacagtc

SEQ ID NO: 156860 - DNA, 15 bp, Homo sapiens
ggtgcagcacagtca

SEQ ID NO: 156861 - DNA, 15 bp, Homo sapiens
gtgcagcacagtcat

SEQ ID NO: 156862 - DNA, 15 bp, Homo sapiens
tgcagcacagtcata

SEQ ID NO: 156863 - DNA, 15 bp, Homo sapiens
gcagcacagtcatag

SEQ ID NO: 156864 - DNA, 15 bp, Homo sapiens
cagcacagtcatagg

SEQ ID NO: 156865 - DNA, 15 bp, Homo sapiens
agcacagtcataggc

SEQ ID NO: 156866 - DNA, 15 bp, Homo sapiens
gcacagtcataggcc

SEQ ID NO: 156867 - DNA, 15 bp, Homo sapiens
cacagtcataggccc

SEQ ID NO: 156868 - DNA, 15 bp, Homo sapiens
acagtcataggccct

SEQ ID NO: 156869 - DNA, 15 bp, Homo sapiens
cagtcataggccctg

SEQ ID NO: 156870 - DNA, 15 bp, Homo sapiens
agtcataggccctgc

SEQ ID NO: 156871 - DNA, 15 bp, Homo sapiens
gtcataggccctgca

SEQ ID NO: 156872 - DNA, 15 bp, Homo sapiens
tcataggccctgcat

SEQ ID NO: 156873 - DNA, 15 bp, Homo sapiens
cataggccctgcatt

SEQ ID NO: 156874 - DNA, 15 bp, Homo sapiens
ataggccctgcattc

SEQ ID NO: 156875 - DNA, 15 bp, Homo sapiens
taggccctgcattcc

SEQ ID NO: 156876 - DNA, 15 bp, Homo sapiens
aggccctgcattcct

SEQ ID NO: 156877 - DNA, 15 bp, Homo sapiens
ggccctgcattcctc

SEQ ID NO: 156878 - DNA, 15 bp, Homo sapiens
gccctgcattcctca

SEQ ID NO: 156879 - DNA, 15 bp, Homo sapiens
ccctgcattcctcat

SEQ ID NO: 156880 - DNA, 15 bp, Homo sapiens
cctgcattcctcatt

SEQ ID NO: 156881 - DNA, 15 bp, Homo sapiens
ctgcattcctcattg

SEQ ID NO: 156882 - DNA, 15 bp, Homo sapiens
tgcattcctcattgc

SEQ ID NO: 156883 - DNA, 15 bp, Homo sapiens
gcattcctcattgcc

SEQ ID NO: 156884 - DNA, 15 bp, Homo sapiens
cattcctcattgccg

SEQ ID NO: 156885 - DNA, 15 bp, Homo sapiens
attcctcattgccgt

SEQ ID NO: 156886 - DNA, 15 bp, Homo sapiens
ttcctcattgccgtg

SEQ ID NO: 156887 - DNA, 15 bp, Homo sapiens
tcctcattgccgtgc

SEQ ID NO: 156888 - DNA, 15 bp, Homo sapiens
cctcattgccgtgct

SEQ ID NO: 156889 - DNA, 15 bp, Homo sapiens
ctcattgccgtgctg

SEQ ID NO: 156890 - DNA, 15 bp, Homo sapiens
tcattgccgtgctgg

SEQ ID NO: 156891 - DNA, 15 bp, Homo sapiens
cattgccgtgctggt

SEQ ID NO: 156892 - DNA, 15 bp, Homo sapiens
attgccgtgctggtt

SEQ ID NO: 156893 - DNA, 15 bp, Homo sapiens
ttgccgtgctggttg

SEQ ID NO: 156894 - DNA, 15 bp, Homo sapiens
tgccgtgctggttgg

SEQ ID NO: 156895 - DNA, 15 bp, Homo sapiens
gccgtgctggttggt

SEQ ID NO: 156896 - DNA, 15 bp, Homo sapiens
ccgtgctggttggtc

SEQ ID NO: 156897 - DNA, 15 bp, Homo sapiens
cgtgctggttggtcg

SEQ ID NO: 156898 - DNA, 15 bp, Homo sapiens
gtgctggttggtcgg

SEQ ID NO: 156899 - DNA, 15 bp, Homo sapiens
tgctggttggtcggg

SEQ ID NO: 156900 - DNA, 15 bp, Homo sapiens
gctggttggtcgggg

SEQ ID NO: 156901 - DNA, 15 bp, Homo sapiens
ctggttggtcgggga

SEQ ID NO: 156902 - DNA, 15 bp, Homo sapiens
tggttggtcggggag

SEQ ID NO: 156903 - DNA, 15 bp, Homo sapiens
ggttggtcggggagg

SEQ ID NO: 156904 - DNA, 15 bp, Homo sapiens
gttggtcggggaggt

SEQ ID NO: 156905 - DNA, 15 bp, Homo sapiens
ttggtcggggaggtg

SEQ ID NO: 156906 - DNA, 15 bp, Homo sapiens
tggtcggggaggtgg

SEQ ID NO: 156907 - DNA, 15 bp, Homo sapiens
ggtcggggaggtggg

SEQ ID NO: 156908 - DNA, 15 bp, Homo sapiens
gtcggggaggtgggc

SEQ ID NO: 156909 - DNA, 15 bp, Homo sapiens
tcggggaggtgggct

SEQ ID NO: 156910 - DNA, 15 bp, Homo sapiens
cggggaggtgggctg

SEQ ID NO: 156911 - DNA, 15 bp, Homo sapiens
ggggaggtgggctgg

SEQ ID NO: 156912 - DNA, 15 bp, Homo sapiens
gggaggtgggctgga

SEQ ID NO: 156913 - DNA, 15 bp, Homo sapiens
ggaggtgggctggac

SEQ ID NO: 156914 - DNA, 15 bp, Homo sapiens
gaggtgggctggact

SEQ ID NO: 156915 - DNA, 15 bp, Homo sapiens
aggtgggctggactc

SEQ ID NO: 156916 - DNA, 15 bp, Homo sapiens
ggtgggctggactcg

SEQ ID NO: 156917 - DNA, 15 bp, Homo sapiens
gtgggctggactcgt

SEQ ID NO: 156918 - DNA, 15 bp, Homo sapiens
tgggctggactcgta

SEQ ID NO: 156919 - DNA, 15 bp, Homo sapiens
gggctggactcgtag

SEQ ID NO: 156920 - DNA, 15 bp, Homo sapiens
ggctggactcgtagg

SEQ ID NO: 156921 - DNA, 15 bp, Homo sapiens
gctggactcgtaggg

SEQ ID NO: 156922 - DNA, 15 bp, Homo sapiens
ctggactcgtaggga

SEQ ID NO: 156923 - DNA, 15 bp, Homo sapiens
tggactcgtagggat

SEQ ID NO: 156924 - DNA, 15 bp, Homo sapiens
ggactcgtagggatt

SEQ ID NO: 156925 - DNA, 15 bp, Homo sapiens
gactcgtagggattt

SEQ ID NO: 156926 - DNA, 15 bp, Homo sapiens
actcgtagggatttg

SEQ ID NO: 156927 - DNA, 15 bp, Homo sapiens
ctcgtagggatttgc

SEQ ID NO: 156928 - DNA, 15 bp, Homo sapiens
tcgtagggatttgcc

SEQ ID NO: 156929 - DNA, 15 bp, Homo sapiens
cgtagggatttgccc

SEQ ID NO: 156930 - DNA, 15 bp, Homo sapiens
gtagggatttgcccc

SEQ ID NO: 156931 - DNA, 15 bp, Homo sapiens
tagggatttgcccct

SEQ ID NO: 156932 - DNA, 15 bp, Homo sapiens
agggatttgcccctt

SEQ ID NO: 156933 - DNA, 15 bp, Homo sapiens
gggatttgccccttg

SEQ ID NO: 156934 - DNA, 15 bp, Homo sapiens
ggatttgccccttgg

SEQ ID NO: 156935 - DNA, 15 bp, Homo sapiens
gatttgccccttggc

SEQ ID NO: 156936 - DNA, 15 bp, Homo sapiens
atttgccccttggcc

SEQ ID NO: 156937 - DNA, 15 bp, Homo sapiens
tttgccccttggcct

SEQ ID NO: 156938 - DNA, 15 bp, Homo sapiens
ttgccccttggcctt

SEQ ID NO: 156939 - DNA, 15 bp, Homo sapiens
tgccccttggccttg

SEQ ID NO: 156940 - DNA, 15 bp, Homo sapiens
gccccttggccttgt

SEQ ID NO: 156941 - DNA, 15 bp, Homo sapiens
ccccttggccttgtt

SEQ ID NO: 156942 - DNA, 15 bp, Homo sapiens
cccttggccttgttt

SEQ ID NO: 156943 - DNA, 15 bp, Homo sapiens
ccttggccttgtttc

SEQ ID NO: 156944 - DNA, 15 bp, Homo sapiens
cttggccttgtttct

SEQ ID NO: 156945 - DNA, 15 bp, Homo sapiens
ttggccttgtttcta

SEQ ID NO: 156946 - DNA, 15 bp, Homo sapiens
tggccttgtttctaa

SEQ ID NO: 156947 - DNA, 15 bp, Homo sapiens
ggccttgtttctaac

SEQ ID NO: 156948 - DNA, 15 bp, Homo sapiens
gccttgtttctaaca

SEQ ID NO: 156949 - DNA, 15 bp, Homo sapiens
ccttgtttctaacac

SEQ ID NO: 156950 - DNA, 15 bp, Homo sapiens
cttgtttctaacact

SEQ ID NO: 156951 - DNA, 15 bp, Homo sapiens
ttgtttctaacactt

SEQ ID NO: 156952 - DNA, 15 bp, Homo sapiens
tgtttctaacacttg

SEQ ID NO: 156953 - DNA, 15 bp, Homo sapiens
gtttctaacacttgc

SEQ ID NO: 156954 - DNA, 15 bp, Homo sapiens
tttctaacacttgcc

SEQ ID NO: 156955 - DNA, 15 bp, Homo sapiens
ttctaacacttgccg

SEQ ID NO: 156956 - DNA, 15 bp, Homo sapiens
tctaacacttgccgt

SEQ ID NO: 156957 - DNA, 15 bp, Homo sapiens
ctaacacttgccgtt

SEQ ID NO: 156958 - DNA, 15 bp, Homo sapiens
taacacttgccgttt

SEQ ID NO: 156959 - DNA, 15 bp, Homo sapiens
aacacttgccgtttc

SEQ ID NO: 156960 - DNA, 15 bp, Homo sapiens
acacttgccgtttcc

SEQ ID NO: 156961 - DNA, 15 bp, Homo sapiens
cacttgccgtttcct

SEQ ID NO: 156962 - DNA, 15 bp, Homo sapiens
acttgccgtttcctg

SEQ ID NO: 156963 - DNA, 15 bp, Homo sapiens
cttgccgtttcctgc

SEQ ID NO: 156964 - DNA, 15 bp, Homo sapiens
ttgccgtttcctgct

SEQ ID NO: 156965 - DNA, 15 bp, Homo sapiens
tgccgtttcctgctg

SEQ ID NO: 156966 - DNA, 15 bp, Homo sapiens
gccgtttcctgctgt

SEQ ID NO: 156967 - DNA, 15 bp, Homo sapiens
ccgtttcctgctgtc

SEQ ID NO: 156968 - DNA, 15 bp, Homo sapiens
cgtttcctgctgtcc

SEQ ID NO: 156969 - DNA, 15 bp, Homo sapiens
gtttcctgctgtccc

SEQ ID NO: 156970 - DNA, 15 bp, Homo sapiens
tttcctgctgtcccc

SEQ ID NO: 156971 - DNA, 15 bp, Homo sapiens
ttcctgctgtccccc

SEQ ID NO: 156972 - DNA, 15 bp, Homo sapiens
tcctgctgtccccct

SEQ ID NO: 156973 - DNA, 15 bp, Homo sapiens
cctgctgtccccctg

SEQ ID NO: 156974 - DNA, 15 bp, Homo sapiens
ctgctgtccccctgc

SEQ ID NO: 156975 - DNA, 15 bp, Homo sapiens
tgctgtccccctgcc

SEQ ID NO: 156976 - DNA, 15 bp, Homo sapiens
gctgtccccctgccc

SEQ ID NO: 156977 - DNA, 15 bp, Homo sapiens
ctgtccccctgcccc

SEQ ID NO: 156978 - DNA, 15 bp, Homo sapiens
tgtccccctgccccc

SEQ ID NO: 156979 - DNA, 15 bp, Homo sapiens
gtccccctgccccct

SEQ ID NO: 156980 - DNA, 15 bp, Homo sapiens
tccccctgccccctc

SEQ ID NO: 156981 - DNA, 15 bp, Homo sapiens
ccccctgccccctcc

SEQ ID NO: 156982 - DNA, 15 bp, Homo sapiens
cccctgccccctcca

SEQ ID NO: 156983 - DNA, 15 bp, Homo sapiens
ccctgccccctccac

SEQ ID NO: 156984 - DNA, 15 bp, Homo sapiens
cctgccccctccact

SEQ ID NO: 156985 - DNA, 15 bp, Homo sapiens
ctgccccctccactg

SEQ ID NO: 156986 - DNA, 15 bp, Homo sapiens
tgccccctccactgc

SEQ ID NO: 156987 - DNA, 15 bp, Homo sapiens
gccccctccactgcc

SEQ ID NO: 156988 - DNA, 15 bp, Homo sapiens
ccccctccactgcct

SEQ ID NO: 156989 - DNA, 15 bp, Homo sapiens
cccctccactgcctg

SEQ ID NO: 156990 - DNA, 15 bp, Homo sapiens
ccctccactgcctgg

SEQ ID NO: 156991 - DNA, 15 bp, Homo sapiens
cctccactgcctggg

SEQ ID NO: 156992 - DNA, 15 bp, Homo sapiens
ctccactgcctgggt

SEQ ID NO: 156993 - DNA, 15 bp, Homo sapiens
tccactgcctgggta

SEQ ID NO: 156994 - DNA, 15 bp, Homo sapiens
ccactgcctgggtaa

SEQ ID NO: 156995 - DNA, 15 bp, Homo sapiens
cactgcctgggtaaa

SEQ ID NO: 156996 - DNA, 15 bp, Homo sapiens
actgcctgggtaaag

SEQ ID NO: 156997 - DNA, 15 bp, Homo sapiens
ctgcctgggtaaaga

SEQ ID NO: 156998 - DNA, 15 bp, Homo sapiens
tgcctgggtaaagat

SEQ ID NO: 156999 - DNA, 15 bp, Homo sapiens
gcctgggtaaagatt

SEQ ID NO: 157000 - DNA, 15 bp, Homo sapiens
cctgggtaaagattg

SEQ ID NO: 157001 - DNA, 15 bp, Homo sapiens
ctgggtaaagattgt

SEQ ID NO: 157002 - DNA, 15 bp, Homo sapiens
tgggtaaagattgtc

SEQ ID NO: 157003 - DNA, 15 bp, Homo sapiens
gggtaaagattgtct

SEQ ID NO: 157004 - DNA, 15 bp, Homo sapiens
ggtaaagattgtctt

SEQ ID NO: 157005 - DNA, 15 bp, Homo sapiens
gtaaagattgtcttg

SEQ ID NO: 157006 - DNA, 15 bp, Homo sapiens
taaagattgtcttgc

SEQ ID NO: 157007 - DNA, 15 bp, Homo sapiens
aaagattgtcttgcc

SEQ ID NO: 157008 - DNA, 15 bp, Homo sapiens
aagattgtcttgcca

SEQ ID NO: 157009 - DNA, 15 bp, Homo sapiens
agattgtcttgccag

SEQ ID NO: 157010 - DNA, 15 bp, Homo sapiens
gattgtcttgccagc

SEQ ID NO: 157011 - DNA, 15 bp, Homo sapiens
attgtcttgccagct

SEQ ID NO: 157012 - DNA, 15 bp, Homo sapiens
ttgtcttgccagctg

SEQ ID NO: 157013 - DNA, 15 bp, Homo sapiens
tgtcttgccagctgt

SEQ ID NO: 157014 - DNA, 15 bp, Homo sapiens
gtcttgccagctgtg

SEQ ID NO: 157015 - DNA, 15 bp, Homo sapiens
tcttgccagctgtgt

SEQ ID NO: 157016 - DNA, 15 bp, Homo sapiens
cttgccagctgtgtt

SEQ ID NO: 157017 - DNA, 15 bp, Homo sapiens
ttgccagctgtgttt

SEQ ID NO: 157018 - DNA, 15 bp, Homo sapiens
tgccagctgtgtttg

SEQ ID NO: 157019 - DNA, 15 bp, Homo sapiens
gccagctgtgtttgt

SEQ ID NO: 157020 - DNA, 15 bp, Homo sapiens
ccagctgtgtttgtc

SEQ ID NO: 157021 - DNA, 15 bp, Homo sapiens
cagctgtgtttgtct

SEQ ID NO: 157022 - DNA, 15 bp, Homo sapiens
agctgtgtttgtctg

SEQ ID NO: 157023 - DNA, 15 bp, Homo sapiens
gctgtgtttgtctgc

SEQ ID NO: 157024 - DNA, 15 bp, Homo sapiens
ctgtgtttgtctgca

SEQ ID NO: 157025 - DNA, 15 bp, Homo sapiens
tgtgtttgtctgcat

SEQ ID NO: 157026 - DNA, 15 bp, Homo sapiens
gtgtttgtctgcatt

SEQ ID NO: 157027 - DNA, 15 bp, Homo sapiens
tgtttgtctgcattg

SEQ ID NO: 157028 - DNA, 15 bp, Homo sapiens
gtttgtctgcattgc

SEQ ID NO: 157029 - DNA, 15 bp, Homo sapiens
tttgtctgcattgcc

SEQ ID NO: 157030 - DNA, 15 bp, Homo sapiens
ttgtctgcattgccc

SEQ ID NO: 157031 - DNA, 15 bp, Homo sapiens
tgtctgcattgccct

SEQ ID NO: 157032 - DNA, 15 bp, Homo sapiens
gtctgcattgccctt

SEQ ID NO: 157033 - DNA, 15 bp, Homo sapiens
tctgcattgcccttg

SEQ ID NO: 157034 - DNA, 15 bp, Homo sapiens
ctgcattgcccttgt

SEQ ID NO: 157035 - DNA, 15 bp, Homo sapiens
tgcattgcccttgtg

SEQ ID NO: 157036 - DNA, 15 bp, Homo sapiens
gcattgcccttgtgt

SEQ ID NO: 157037 - DNA, 15 bp, Homo sapiens
cattgcccttgtgtt

SEQ ID NO: 157038 - DNA, 15 bp, Homo sapiens
attgcccttgtgttc

SEQ ID NO: 157039 - DNA, 15 bp, Homo sapiens
ttgcccttgtgttca

SEQ ID NO: 157040 - DNA, 15 bp, Homo sapiens
tgcccttgtgttcag

SEQ ID NO: 157041 - DNA, 15 bp, Homo sapiens
gcccttgtgttcagc

SEQ ID NO: 157042 - DNA, 15 bp, Homo sapiens
cccttgtgttcagcc

SEQ ID NO: 157043 - DNA, 15 bp, Homo sapiens
ccttgtgttcagcct

SEQ ID NO: 157044 - DNA, 15 bp, Homo sapiens
cttgtgttcagcctg

SEQ ID NO: 157045 - DNA, 15 bp, Homo sapiens
ttgtgttcagcctga

SEQ ID NO: 157046 - DNA, 15 bp, Homo sapiens
tgtgttcagcctgat

SEQ ID NO: 157047 - DNA, 15 bp, Homo sapiens
gtgttcagcctgatc

SEQ ID NO: 157048 - DNA, 15 bp, Homo sapiens
tgttcagcctgatcg

SEQ ID NO: 157049 - DNA, 15 bp, Homo sapiens
gttcagcctgatcgt

SEQ ID NO: 157050 - DNA, 15 bp, Homo sapiens
ttcagcctgatcgtg

SEQ ID NO: 157051 - DNA, 15 bp, Homo sapiens
tcagcctgatcgtgc

SEQ ID NO: 157052 - DNA, 15 bp, Homo sapiens
cagcctgatcgtgcc

SEQ ID NO: 157053 - DNA, 15 bp, Homo sapiens
agcctgatcgtgcca

SEQ ID NO: 157054 - DNA, 15 bp, Homo sapiens
gcctgatcgtgccac

SEQ ID NO: 157055 - DNA, 15 bp, Homo sapiens
cctgatcgtgccacc

SEQ ID NO: 157056 - DNA, 15 bp, Homo sapiens
ctgatcgtgccaccc

SEQ ID NO: 157057 - DNA, 15 bp, Homo sapiens
tgatcgtgccaccct

SEQ ID NO: 157058 - DNA, 15 bp, Homo sapiens
gatcgtgccaccctt

SEQ ID NO: 157059 - DNA, 15 bp, Homo sapiens
atcgtgccacccttt

SEQ ID NO: 157060 - DNA, 15 bp, Homo sapiens
tcgtgccaccctttg

SEQ ID NO: 157061 - DNA, 15 bp, Homo sapiens
cgtgccaccctttgg

SEQ ID NO: 157062 - DNA, 15 bp, Homo sapiens
gtgccaccctttggc

SEQ ID NO: 157063 - DNA, 15 bp, Homo sapiens
tgccaccctttggca

SEQ ID NO: 157064 - DNA, 15 bp, Homo sapiens
gccaccctttggcaa

SEQ ID NO: 157065 - DNA, 15 bp, Homo sapiens
ccaccctttggcaag

SEQ ID NO: 157066 - DNA, 15 bp, Homo sapiens
caccctttggcaagt

SEQ ID NO: 157067 - DNA, 15 bp, Homo sapiens
accctttggcaagta

SEQ ID NO: 157068 - DNA, 15 bp, Homo sapiens
ccctttggcaagtac

SEQ ID NO: 157069 - DNA, 15 bp, Homo sapiens
cctttggcaagtacc

SEQ ID NO: 157070 - DNA, 15 bp, Homo sapiens
ctttggcaagtaccc

SEQ ID NO: 157071 - DNA, 15 bp, Homo sapiens
tttggcaagtacccc

SEQ ID NO: 157072 - DNA, 15 bp, Homo sapiens
ttggcaagtacccca

SEQ ID NO: 157073 - DNA, 15 bp, Homo sapiens
tggcaagtaccccag

SEQ ID NO: 157074 - DNA, 15 bp, Homo sapiens
ggcaagtaccccagc

SEQ ID NO: 157075 - DNA, 15 bp, Homo sapiens
gcaagtaccccagcc

SEQ ID NO: 157076 - DNA, 15 bp, Homo sapiens
caagtaccccagcct

SEQ ID NO: 157077 - DNA, 15 bp, Homo sapiens
aagtaccccagcctg

SEQ ID NO: 157078 - DNA, 15 bp, Homo sapiens
agtaccccagcctgg

SEQ ID NO: 157079 - DNA, 15 bp, Homo sapiens
gtaccccagcctgga

SEQ ID NO: 157080 - DNA, 15 bp, Homo sapiens
taccccagcctggaa

SEQ ID NO: 157081 - DNA, 15 bp, Homo sapiens
accccagcctggaac

SEQ ID NO: 157082 - DNA, 15 bp, Homo sapiens
ccccagcctggaact

SEQ ID NO: 157083 - DNA, 15 bp, Homo sapiens
cccagcctggaactt

SEQ ID NO: 157084 - DNA, 15 bp, Homo sapiens
ccagcctggaacttc

SEQ ID NO: 157085 - DNA, 15 bp, Homo sapiens
cagcctggaacttca

SEQ ID NO: 157086 - DNA, 15 bp, Homo sapiens
agcctggaacttcag

SEQ ID NO: 157087 - DNA, 15 bp, Homo sapiens
gcctggaacttcagc

SEQ ID NO: 157088 - DNA, 15 bp, Homo sapiens
cctggaacttcagcc

SEQ ID NO: 157089 - DNA, 15 bp, Homo sapiens
ctggaacttcagccc

SEQ ID NO: 157090 - DNA, 15 bp, Homo sapiens
tggaacttcagccct

SEQ ID NO: 157091 - DNA, 15 bp, Homo sapiens
ggaacttcagccctg

SEQ ID NO: 157092 - DNA, 15 bp, Homo sapiens
gaacttcagccctgg

SEQ ID NO: 157093 - DNA, 15 bp, Homo sapiens
aacttcagccctgga

SEQ ID NO: 157094 - DNA, 15 bp, Homo sapiens
acttcagccctggat

SEQ ID NO: 157095 - DNA, 15 bp, Homo sapiens
cttcagccctggatg

SEQ ID NO: 157096 - DNA, 15 bp, Homo sapiens
ttcagccctggatgt

SEQ ID NO: 157097 - DNA, 15 bp, Homo sapiens
tcagccctggatgta

SEQ ID NO: 157098 - DNA, 15 bp, Homo sapiens
cagccctggatgtac

SEQ ID NO: 157099 - DNA, 15 bp, Homo sapiens
agccctggatgtaca

SEQ ID NO: 157100 - DNA, 15 bp, Homo sapiens
gccctggatgtacaa

SEQ ID NO: 157101 - DNA, 15 bp, Homo sapiens
ccctggatgtacaac

SEQ ID NO: 157102 - DNA, 15 bp, Homo sapiens
cctggatgtacaacg

SEQ ID NO: 157103 - DNA, 15 bp, Homo sapiens
ctggatgtacaacga

SEQ ID NO: 157104 - DNA, 15 bp, Homo sapiens
tggatgtacaacgaa

SEQ ID NO: 157105 - DNA, 15 bp, Homo sapiens
ggatgtacaacgaac

SEQ ID NO: 157106 - DNA, 15 bp, Homo sapiens
gatgtacaacgaaca

SEQ ID NO: 157107 - DNA, 15 bp, Homo sapiens
atgtacaacgaacag

SEQ ID NO: 157108 - DNA, 15 bp, Homo sapiens
tgtacaacgaacagt

SEQ ID NO: 157109 - DNA, 15 bp, Homo sapiens
gtacaacgaacagta

SEQ ID NO: 157110 - DNA, 15 bp, Homo sapiens
tacaacgaacagtac

SEQ ID NO: 157111 - DNA, 15 bp, Homo sapiens
acaacgaacagtaca

SEQ ID NO: 157112 - DNA, 15 bp, Homo sapiens
caacgaacagtacac

SEQ ID NO: 157113 - DNA, 15 bp, Homo sapiens
aacgaacagtacaca

SEQ ID NO: 157114 - DNA, 15 bp, Homo sapiens
acgaacagtacacat

SEQ ID NO: 157115 - DNA, 15 bp, Homo sapiens
cgaacagtacacatt

SEQ ID NO: 157116 - DNA, 15 bp, Homo sapiens
gaacagtacacattt

SEQ ID NO: 157117 - DNA, 15 bp, Homo sapiens
aacagtacacatttg

SEQ ID NO: 157118 - DNA, 15 bp, Homo sapiens
acagtacacatttgt

SEQ ID NO: 157119 - DNA, 15 bp, Homo sapiens
cagtacacatttgtc

SEQ ID NO: 157120 - DNA, 15 bp, Homo sapiens
agtacacatttgtca

SEQ ID NO: 157121 - DNA, 15 bp, Homo sapiens
gtacacatttgtcag

SEQ ID NO: 157122 - DNA, 15 bp, Homo sapiens
tacacatttgtcagg

SEQ ID NO: 157123 - DNA, 15 bp, Homo sapiens
acacatttgtcaggt

SEQ ID NO: 157124 - DNA, 15 bp, Homo sapiens
cacatttgtcaggta

SEQ ID NO: 157125 - DNA, 15 bp, Homo sapiens
acatttgtcaggtat

SEQ ID NO: 157126 - DNA, 15 bp, Homo sapiens
catttgtcaggtatg

SEQ ID NO: 157127 - DNA, 15 bp, Homo sapiens
atttgtcaggtatgt

SEQ ID NO: 157128 - DNA, 15 bp, Homo sapiens
tttgtcaggtatgtt

SEQ ID NO: 157129 - DNA, 15 bp, Homo sapiens
ttgtcaggtatgttt

SEQ ID NO: 157130 - DNA, 15 bp, Homo sapiens
tgtcaggtatgtttg

SEQ ID NO: 157131 - DNA, 15 bp, Homo sapiens
gtcaggtatgtttgt

SEQ ID NO: 157132 - DNA, 15 bp, Homo sapiens
tcaggtatgtttgtc

SEQ ID NO: 157133 - DNA, 15 bp, Homo sapiens
caggtatgtttgtct

SEQ ID NO: 157134 - DNA, 15 bp, Homo sapiens
aggtatgtttgtctt

SEQ ID NO: 157135 - DNA, 15 bp, Homo sapiens
ggtatgtttgtcttc

SEQ ID NO: 157136 - DNA, 15 bp, Homo sapiens
gtatgtttgtcttct

SEQ ID NO: 157137 - DNA, 15 bp, Homo sapiens
tatgtttgtcttcta

SEQ ID NO: 157138 - DNA, 15 bp, Homo sapiens
atgtttgtcttctac

SEQ ID NO: 157139 - DNA, 15 bp, Homo sapiens
tgtttgtcttctaca

SEQ ID NO: 157140 - DNA, 15 bp, Homo sapiens
gtttgtcttctacat

SEQ ID NO: 157141 - DNA, 15 bp, Homo sapiens
tttgtcttctacatc

SEQ ID NO: 157142 - DNA, 15 bp, Homo sapiens
ttgtcttctacatcc

SEQ ID NO: 157143 - DNA, 15 bp, Homo sapiens
tgtcttctacatccc

SEQ ID NO: 157144 - DNA, 15 bp, Homo sapiens
gtcttctacatccca

SEQ ID NO: 157145 - DNA, 15 bp, Homo sapiens
tcttctacatcccag

SEQ ID NO: 157146 - DNA, 15 bp, Homo sapiens
cttctacatcccagg

SEQ ID NO: 157147 - DNA, 15 bp, Homo sapiens
ttctacatcccagga

SEQ ID NO: 157148 - DNA, 15 bp, Homo sapiens
tctacatcccaggag

SEQ ID NO: 157149 - DNA, 15 bp, Homo sapiens
ctacatcccaggagg

SEQ ID NO: 157150 - DNA, 15 bp, Homo sapiens
tacatcccaggaggg

SEQ ID NO: 157151 - DNA, 15 bp, Homo sapiens
acatcccaggagggg

SEQ ID NO: 157152 - DNA, 15 bp, Homo sapiens
catcccaggaggggg

SEQ ID NO: 157153 - DNA, 15 bp, Homo sapiens
atcccaggagggggt

SEQ ID NO: 157154 - DNA, 15 bp, Homo sapiens
tcccaggagggggta

SEQ ID NO: 157155 - DNA, 15 bp, Homo sapiens
cccaggagggggtaa

SEQ ID NO: 157156 - DNA, 15 bp, Homo sapiens
ccaggagggggtaag

SEQ ID NO: 157157 - DNA, 15 bp, Homo sapiens
caggagggggtaaga

SEQ ID NO: 157158 - DNA, 15 bp, Homo sapiens
aggagggggtaagat

SEQ ID NO: 157159 - DNA, 15 bp, Homo sapiens
ggagggggtaagatt

SEQ ID NO: 157160 - DNA, 15 bp, Homo sapiens
gagggggtaagattc

SEQ ID NO: 157161 - DNA, 15 bp, Homo sapiens
agggggtaagattcg

SEQ ID NO: 157162 - DNA, 15 bp, Homo sapiens
gggggtaagattcga

SEQ ID NO: 157163 - DNA, 15 bp, Homo sapiens
ggggtaagattcgag

SEQ ID NO: 157164 - DNA, 15 bp, Homo sapiens
gggtaagattcgagc

SEQ ID NO: 157165 - DNA, 15 bp, Homo sapiens
ggtaagattcgagca

SEQ ID NO: 157166 - DNA, 15 bp, Homo sapiens
gtaagattcgagcag

SEQ ID NO: 157167 - DNA, 15 bp, Homo sapiens
taagattcgagcaga

SEQ ID NO: 157168 - DNA, 15 bp, Homo sapiens
aagattcgagcagac

SEQ ID NO: 157169 - DNA, 15 bp, Homo sapiens
agattcgagcagacc

SEQ ID NO: 157170 - DNA, 15 bp, Homo sapiens
gattcgagcagacca

SEQ ID NO: 157171 - DNA, 15 bp, Homo sapiens
attcgagcagaccaa

SEQ ID NO: 157172 - DNA, 15 bp, Homo sapiens
ttcgagcagaccaaa

SEQ ID NO: 157173 - DNA, 15 bp, Homo sapiens
tcgagcagaccaaag

SEQ ID NO: 157174 - DNA, 15 bp, Homo sapiens
cgagcagaccaaaga

SEQ ID NO: 157175 - DNA, 15 bp, Homo sapiens
gagcagaccaaagat

SEQ ID NO: 157176 - DNA, 15 bp, Homo sapiens
agcagaccaaagatg

SEQ ID NO: 157177 - DNA, 15 bp, Homo sapiens
gcagaccaaagatgt

SEQ ID NO: 157178 - DNA, 15 bp, Homo sapiens
cagaccaaagatgtt

SEQ ID NO: 157179 - DNA, 15 bp, Homo sapiens
agaccaaagatgttt

SEQ ID NO: 157180 - DNA, 15 bp, Homo sapiens
gaccaaagatgttta

SEQ ID NO: 157181 - DNA, 15 bp, Homo sapiens
accaaagatgtttac

SEQ ID NO: 157182 - DNA, 15 bp, Homo sapiens
ccaaagatgtttacg

SEQ ID NO: 157183 - DNA, 15 bp, Homo sapiens
caaagatgtttacga

SEQ ID NO: 157184 - DNA, 15 bp, Homo sapiens
aaagatgtttacgag

SEQ ID NO: 157185 - DNA, 15 bp, Homo sapiens
aagatgtttacgagg

SEQ ID NO: 157186 - DNA, 15 bp, Homo sapiens
agatgtttacgaggg

SEQ ID NO: 157187 - DNA, 15 bp, Homo sapiens
gatgtttacgagggc

SEQ ID NO: 157188 - DNA, 15 bp, Homo sapiens
atgtttacgagggcc

SEQ ID NO: 157189 - DNA, 15 bp, Homo sapiens
tgtttacgagggcca

SEQ ID NO: 157190 - DNA, 15 bp, Homo sapiens
gtttacgagggccaa

SEQ ID NO: 157191 - DNA, 15 bp, Homo sapiens
tttacgagggccaag

SEQ ID NO: 157192 - DNA, 15 bp, Homo sapiens
ttacgagggccaagg

SEQ ID NO: 157193 - DNA, 15 bp, Homo sapiens
tacgagggccaaggg

SEQ ID NO: 157194 - DNA, 15 bp, Homo sapiens
acgagggccaaggga

SEQ ID NO: 157195 - DNA, 15 bp, Homo sapiens
cgagggccaagggaa

SEQ ID NO: 157196 - DNA, 15 bp, Homo sapiens
gagggccaagggaat

SEQ ID NO: 157197 - DNA, 15 bp, Homo sapiens
agggccaagggaatg

SEQ ID NO: 157198 - DNA, 15 bp, Homo sapiens
gggccaagggaatgg

SEQ ID NO: 157199 - DNA, 15 bp, Homo sapiens
ggccaagggaatgga

SEQ ID NO: 157200 - DNA, 15 bp, Homo sapiens
gccaagggaatggac

SEQ ID NO: 157201 - DNA, 15 bp, Homo sapiens
ccaagggaatggact

SEQ ID NO: 157202 - DNA, 15 bp, Homo sapiens
caagggaatggactt

SEQ ID NO: 157203 - DNA, 15 bp, Homo sapiens
aagggaatggacttc

SEQ ID NO: 157204 - DNA, 15 bp, Homo sapiens
agggaatggacttca

SEQ ID NO: 157205 - DNA, 15 bp, Homo sapiens
gggaatggacttcag

SEQ ID NO: 157206 - DNA, 15 bp, Homo sapiens
ggaatggacttcaga

SEQ ID NO: 157207 - DNA, 15 bp, Homo sapiens
gaatggacttcagaa

SEQ ID NO: 157208 - DNA, 15 bp, Homo sapiens
aatggacttcagaat

SEQ ID NO: 157209 - DNA, 15 bp, Homo sapiens
atggacttcagaatt

SEQ ID NO: 157210 - DNA, 15 bp, Homo sapiens
tggacttcagaatta

SEQ ID NO: 157211 - DNA, 15 bp, Homo sapiens
ggacttcagaattac

SEQ ID NO: 157212 - DNA, 15 bp, Homo sapiens
gacttcagaattaca

SEQ ID NO: 157213 - DNA, 15 bp, Homo sapiens
acttcagaattacac

SEQ ID NO: 157214 - DNA, 15 bp, Homo sapiens
cttcagaattacacg

SEQ ID NO: 157215 - DNA, 15 bp, Homo sapiens
ttcagaattacacgg

SEQ ID NO: 157216 - DNA, 15 bp, Homo sapiens
tcagaattacacggt

SEQ ID NO: 157217 - DNA, 15 bp, Homo sapiens
cagaattacacggtg

SEQ ID NO: 157218 - DNA, 15 bp, Homo sapiens
agaattacacggtgg

SEQ ID NO: 157219 - DNA, 15 bp, Homo sapiens
gaattacacggtgga

SEQ ID NO: 157220 - DNA, 15 bp, Homo sapiens
aattacacggtggaa

SEQ ID NO: 157221 - DNA, 15 bp, Homo sapiens
attacacggtggaat

SEQ ID NO: 157222 - DNA, 15 bp, Homo sapiens
ttacacggtggaatg

SEQ ID NO: 157223 - DNA, 15 bp, Homo sapiens
tacacggtggaatga

SEQ ID NO: 157224 - DNA, 15 bp, Homo sapiens
acacggtggaatgaa

SEQ ID NO: 157225 - DNA, 15 bp, Homo sapiens
cacggtggaatgaat

SEQ ID NO: 157226 - DNA, 15 bp, Homo sapiens
acggtggaatgaatt

SEQ ID NO: 157227 - DNA, 15 bp, Homo sapiens
cggtggaatgaattt

SEQ ID NO: 157228 - DNA, 15 bp, Homo sapiens
ggtggaatgaatttt

SEQ ID NO: 157229 - DNA, 15 bp, Homo sapiens
gtggaatgaatttta

SEQ ID NO: 157230 - DNA, 15 bp, Homo sapiens
tggaatgaattttac

SEQ ID NO: 157231 - DNA, 15 bp, Homo sapiens
ggaatgaattttact

SEQ ID NO: 157232 - DNA, 15 bp, Homo sapiens
gaatgaattttactg

SEQ ID NO: 157233 - DNA, 15 bp, Homo sapiens
aatgaattttactgc

SEQ ID NO: 157234 - DNA, 15 bp, Homo sapiens
atgaattttactgct

SEQ ID NO: 157235 - DNA, 15 bp, Homo sapiens
tgaattttactgctg

SEQ ID NO: 157236 - DNA, 15 bp, Homo sapiens
gaattttactgctgc

SEQ ID NO: 157237 - DNA, 15 bp, Homo sapiens
aattttactgctgcg

SEQ ID NO: 157238 - DNA, 15 bp, Homo sapiens
attttactgctgcgg

SEQ ID NO: 157239 - DNA, 15 bp, Homo sapiens
ttttactgctgcggc

SEQ ID NO: 157240 - DNA, 15 bp, Homo sapiens
tttactgctgcggct

SEQ ID NO: 157241 - DNA, 15 bp, Homo sapiens
ttactgctgcggctc

SEQ ID NO: 157242 - DNA, 15 bp, Homo sapiens
tactgctgcggctca

SEQ ID NO: 157243 - DNA, 15 bp, Homo sapiens
actgctgcggctcag

SEQ ID NO: 157244 - DNA, 15 bp, Homo sapiens
ctgctgcggctcagg

SEQ ID NO: 157245 - DNA, 15 bp, Homo sapiens
tgctgcggctcaggt

SEQ ID NO: 157246 - DNA, 15 bp, Homo sapiens
gctgcggctcaggtc

SEQ ID NO: 157247 - DNA, 15 bp, Homo sapiens
ctgcggctcaggtcc

SEQ ID NO: 157248 - DNA, 15 bp, Homo sapiens
tgcggctcaggtccc

SEQ ID NO: 157249 - DNA, 15 bp, Homo sapiens
gcggctcaggtccct

SEQ ID NO: 157250 - DNA, 15 bp, Homo sapiens
cggctcaggtccctg

SEQ ID NO: 157251 - DNA, 15 bp, Homo sapiens
ggctcaggtccctgt

SEQ ID NO: 157252 - DNA, 15 bp, Homo sapiens
gctcaggtccctgta

SEQ ID NO: 157253 - DNA, 15 bp, Homo sapiens
ctcaggtccctgtat

SEQ ID NO: 157254 - DNA, 15 bp, Homo sapiens
tcaggtccctgtata

SEQ ID NO: 157255 - DNA, 15 bp, Homo sapiens
caggtccctgtataa

SEQ ID NO: 157256 - DNA, 15 bp, Homo sapiens
aggtccctgtataag

SEQ ID NO: 157257 - DNA, 15 bp, Homo sapiens
ggtccctgtataagc

SEQ ID NO: 157258 - DNA, 15 bp, Homo sapiens
gtccctgtataagct

SEQ ID NO: 157259 - DNA, 15 bp, Homo sapiens
tccctgtataagcta

SEQ ID NO: 157260 - DNA, 15 bp, Homo sapiens
ccctgtataagctaa

SEQ ID NO: 157261 - DNA, 15 bp, Homo sapiens
cctgtataagctaat

SEQ ID NO: 157262 - DNA, 15 bp, Homo sapiens
ctgtataagctaata

SEQ ID NO: 157263 - DNA, 15 bp, Homo sapiens
tgtataagctaatac

SEQ ID NO: 157264 - DNA, 15 bp, Homo sapiens
gtataagctaatact

SEQ ID NO: 157265 - DNA, 15 bp, Homo sapiens
tataagctaatactg

SEQ ID NO: 157266 - DNA, 15 bp, Homo sapiens
ataagctaatactgc

SEQ ID NO: 157267 - DNA, 15 bp, Homo sapiens
taagctaatactgca

SEQ ID NO: 157268 - DNA, 15 bp, Homo sapiens
aagctaatactgcat

SEQ ID NO: 157269 - DNA, 15 bp, Homo sapiens
agctaatactgcatg

SEQ ID NO: 157270 - DNA, 15 bp, Homo sapiens
gctaatactgcatgc

SEQ ID NO: 157271 - DNA, 15 bp, Homo sapiens
ctaatactgcatgca

SEQ ID NO: 157272 - DNA, 15 bp, Homo sapiens
taatactgcatgcat

SEQ ID NO: 157273 - DNA, 15 bp, Homo sapiens
aatactgcatgcata

SEQ ID NO: 157274 - DNA, 15 bp, Homo sapiens
atactgcatgcatag

SEQ ID NO: 157275 - DNA, 15 bp, Homo sapiens
tactgcatgcataga

SEQ ID NO: 157276 - DNA, 15 bp, Homo sapiens
actgcatgcatagaa

SEQ ID NO: 157277 - DNA, 15 bp, Homo sapiens
ctgcatgcatagaac

SEQ ID NO: 157278 - DNA, 15 bp, Homo sapiens
tgcatgcatagaaca

SEQ ID NO: 157279 - DNA, 15 bp, Homo sapiens
gcatgcatagaacag

SEQ ID NO: 157280 - DNA, 15 bp, Homo sapiens
catgcatagaacagc

SEQ ID NO: 157281 - DNA, 15 bp, Homo sapiens
atgcatagaacagca

SEQ ID NO: 157282 - DNA, 15 bp, Homo sapiens
tgcatagaacagcag

SEQ ID NO: 157283 - DNA, 15 bp, Homo sapiens
gcatagaacagcagc

SEQ ID NO: 157284 - DNA, 15 bp, Homo sapiens
catagaacagcagcg

SEQ ID NO: 157285 - DNA, 15 bp, Homo sapiens
atagaacagcagcga

SEQ ID NO: 157286 - DNA, 15 bp, Homo sapiens
tagaacagcagcgaa

SEQ ID NO: 157287 - DNA, 15 bp, Homo sapiens
agaacagcagcgaac

SEQ ID NO: 157288 - DNA, 15 bp, Homo sapiens
gaacagcagcgaact

SEQ ID NO: 157289 - DNA, 15 bp, Homo sapiens
aacagcagcgaacta

SEQ ID NO: 157290 - DNA, 15 bp, Homo sapiens
acagcagcgaactaa

SEQ ID NO: 157291 - DNA, 15 bp, Homo sapiens
cagcagcgaactaac

SEQ ID NO: 157292 - DNA, 15 bp, Homo sapiens
agcagcgaactaacc

SEQ ID NO: 157293 - DNA, 15 bp, Homo sapiens
gcagcgaactaaccc

SEQ ID NO: 157294 - DNA, 15 bp, Homo sapiens
cagcgaactaaccct

SEQ ID NO: 157295 - DNA, 15 bp, Homo sapiens
agcgaactaaccctg

SEQ ID NO: 157296 - DNA, 15 bp, Homo sapiens
gcgaactaaccctga

SEQ ID NO: 157297 - DNA, 15 bp, Homo sapiens
cgaactaaccctgaa

SEQ ID NO: 157298 - DNA, 15 bp, Homo sapiens
gaactaaccctgaat

SEQ ID NO: 157299 - DNA, 15 bp, Homo sapiens
aactaaccctgaata

SEQ ID NO: 157300 - DNA, 15 bp, Homo sapiens
actaaccctgaataa

SEQ ID NO: 157301 - DNA, 15 bp, Homo sapiens
ctaaccctgaataat

SEQ ID NO: 157302 - DNA, 15 bp, Homo sapiens
taaccctgaataata

SEQ ID NO: 157303 - DNA, 15 bp, Homo sapiens
aaccctgaataatag

SEQ ID NO: 157304 - DNA, 15 bp, Homo sapiens
accctgaataatagg

SEQ ID NO: 157305 - DNA, 15 bp, Homo sapiens
ccctgaataataggc

SEQ ID NO: 157306 - DNA, 15 bp, Homo sapiens
cctgaataataggcc

SEQ ID NO: 157307 - DNA, 15 bp, Homo sapiens
ctgaataataggcca

SEQ ID NO: 157308 - DNA, 15 bp, Homo sapiens
tgaataataggccag

SEQ ID NO: 157309 - DNA, 15 bp, Homo sapiens
gaataataggccagt

SEQ ID NO: 157310 - DNA, 15 bp, Homo sapiens
aataataggccagtc

SEQ ID NO: 157311 - DNA, 15 bp, Homo sapiens
ataataggccagtct

SEQ ID NO: 157312 - DNA, 15 bp, Homo sapiens
taataggccagtctt

SEQ ID NO: 157313 - DNA, 15 bp, Homo sapiens
aataggccagtcttc

SEQ ID NO: 157314 - DNA, 15 bp, Homo sapiens
ataggccagtcttct

SEQ ID NO: 157315 - DNA, 15 bp, Homo sapiens
taggccagtcttctg

SEQ ID NO: 157316 - DNA, 15 bp, Homo sapiens
aggccagtcttctgt

SEQ ID NO: 157317 - DNA, 15 bp, Homo sapiens
ggccagtcttctgtt

SEQ ID NO: 157318 - DNA, 15 bp, Homo sapiens
gccagtcttctgttg

SEQ ID NO: 157319 - DNA, 15 bp, Homo sapiens
ccagtcttctgttga

SEQ ID NO: 157320 - DNA, 15 bp, Homo sapiens
cagtcttctgttgag

SEQ ID NO: 157321 - DNA, 15 bp, Homo sapiens
agtcttctgttgagc

SEQ ID NO: 157322 - DNA, 15 bp, Homo sapiens
gtcttctgttgagcc

SEQ ID NO: 157323 - DNA, 15 bp, Homo sapiens
tcttctgttgagcct

SEQ ID NO: 157324 - DNA, 15 bp, Homo sapiens
cttctgttgagcctt

SEQ ID NO: 157325 - DNA, 15 bp, Homo sapiens
ttctgttgagccttt

SEQ ID NO: 157326 - DNA, 15 bp, Homo sapiens
tctgttgagcctttc

SEQ ID NO: 157327 - DNA, 15 bp, Homo sapiens
ctgttgagcctttca

SEQ ID NO: 157328 - DNA, 15 bp, Homo sapiens
tgttgagcctttcag

SEQ ID NO: 157329 - DNA, 15 bp, Homo sapiens
gttgagcctttcagc

SEQ ID NO: 157330 - DNA, 15 bp, Homo sapiens
ttgagcctttcagcc

SEQ ID NO: 157331 - DNA, 15 bp, Homo sapiens
tgagcctttcagcct

SEQ ID NO: 157332 - DNA, 15 bp, Homo sapiens
gagcctttcagcctc

SEQ ID NO: 157333 - DNA, 15 bp, Homo sapiens
agcctttcagcctct

SEQ ID NO: 157334 - DNA, 15 bp, Homo sapiens
gcctttcagcctctc

SEQ ID NO: 157335 - DNA, 15 bp, Homo sapiens
cctttcagcctctct

SEQ ID NO: 157336 - DNA, 15 bp, Homo sapiens
ctttcagcctctctc

SEQ ID NO: 157337 - DNA, 15 bp, Homo sapiens
tttcagcctctctcc

SEQ ID NO: 157338 - DNA, 15 bp, Homo sapiens
ttcagcctctctcct

SEQ ID NO: 157339 - DNA, 15 bp, Homo sapiens
tcagcctctctcctc

SEQ ID NO: 157340 - DNA, 15 bp, Homo sapiens
cagcctctctcctct

SEQ ID NO: 157341 - DNA, 15 bp, Homo sapiens
agcctctctcctctt

SEQ ID NO: 157342 - DNA, 15 bp, Homo sapiens
gcctctctcctcttc

SEQ ID NO: 157343 - DNA, 15 bp, Homo sapiens
cctctctcctcttca

SEQ ID NO: 157344 - DNA, 15 bp, Homo sapiens
ctctctcctcttcat

SEQ ID NO: 157345 - DNA, 15 bp, Homo sapiens
tctctcctcttcatc

SEQ ID NO: 157346 - DNA, 15 bp, Homo sapiens
ctctcctcttcatcc

SEQ ID NO: 157347 - DNA, 15 bp, Homo sapiens
tctcctcttcatcct

SEQ ID NO: 157348 - DNA, 15 bp, Homo sapiens
ctcctcttcatccta

SEQ ID NO: 157349 - DNA, 15 bp, Homo sapiens
tcctcttcatcctac

SEQ ID NO: 157350 - DNA, 15 bp, Homo sapiens
cctcttcatcctact

SEQ ID NO: 157351 - DNA, 15 bp, Homo sapiens
ctcttcatcctactg

SEQ ID NO: 157352 - DNA, 15 bp, Homo sapiens
tcttcatcctactgt

SEQ ID NO: 157353 - DNA, 15 bp, Homo sapiens
cttcatcctactgtt

SEQ ID NO: 157354 - DNA, 15 bp, Homo sapiens
ttcatcctactgttg

SEQ ID NO: 157355 - DNA, 15 bp, Homo sapiens
tcatcctactgttgt

SEQ ID NO: 157356 - DNA, 15 bp, Homo sapiens
catcctactgttgtc

SEQ ID NO: 157357 - DNA, 15 bp, Homo sapiens
atcctactgttgtca

SEQ ID NO: 157358 - DNA, 15 bp, Homo sapiens
tcctactgttgtcag

SEQ ID NO: 157359 - DNA, 15 bp, Homo sapiens
cctactgttgtcagg

SEQ ID NO: 157360 - DNA, 15 bp, Homo sapiens
ctactgttgtcagga

SEQ ID NO: 157361 - DNA, 15 bp, Homo sapiens
tactgttgtcaggaa

SEQ ID NO: 157362 - DNA, 15 bp, Homo sapiens
actgttgtcaggaac

SEQ ID NO: 157363 - DNA, 15 bp, Homo sapiens
ctgttgtcaggaaca

SEQ ID NO: 157364 - DNA, 15 bp, Homo sapiens
tgttgtcaggaacag

SEQ ID NO: 157365 - DNA, 15 bp, Homo sapiens
gttgtcaggaacagc

SEQ ID NO: 157366 - DNA, 15 bp, Homo sapiens
ttgtcaggaacagcc

SEQ ID NO: 157367 - DNA, 15 bp, Homo sapiens
tgtcaggaacagcca

SEQ ID NO: 157368 - DNA, 15 bp, Homo sapiens
gtcaggaacagccac

SEQ ID NO: 157369 - DNA, 15 bp, Homo sapiens
tcaggaacagccaca

SEQ ID NO: 157370 - DNA, 15 bp, Homo sapiens
caggaacagccacat

SEQ ID NO: 157371 - DNA, 15 bp, Homo sapiens
aggaacagccacatg

SEQ ID NO: 157372 - DNA, 15 bp, Homo sapiens
ggaacagccacatgt

SEQ ID NO: 157373 - DNA, 15 bp, Homo sapiens
gaacagccacatgtg

SEQ ID NO: 157374 - DNA, 15 bp, Homo sapiens
aacagccacatgtgt

SEQ ID NO: 157375 - DNA, 15 bp, Homo sapiens
acagccacatgtgtt

SEQ ID NO: 157376 - DNA, 15 bp, Homo sapiens
cagccacatgtgttt

SEQ ID NO: 157377 - DNA, 15 bp, Homo sapiens
agccacatgtgtttt

SEQ ID NO: 157378 - DNA, 15 bp, Homo sapiens
gccacatgtgtttta

SEQ ID NO: 157379 - DNA, 15 bp, Homo sapiens
ccacatgtgttttag

SEQ ID NO: 157380 - DNA, 15 bp, Homo sapiens
cacatgtgttttagg

SEQ ID NO: 157381 - DNA, 15 bp, Homo sapiens
acatgtgttttaggt

SEQ ID NO: 157382 - DNA, 15 bp, Homo sapiens
catgtgttttaggtg

SEQ ID NO: 157383 - DNA, 15 bp, Homo sapiens
atgtgttttaggtga

SEQ ID NO: 157384 - DNA, 15 bp, Homo sapiens
tgtgttttaggtgaa

SEQ ID NO: 157385 - DNA, 15 bp, Homo sapiens
gtgttttaggtgaaa

SEQ ID NO: 157386 - DNA, 15 bp, Homo sapiens
tgttttaggtgaaat

SEQ ID NO: 157387 - DNA, 15 bp, Homo sapiens
gttttaggtgaaata

SEQ ID NO: 157388 - DNA, 15 bp, Homo sapiens
ttttaggtgaaataa

SEQ ID NO: 157389 - DNA, 15 bp, Homo sapiens
tttaggtgaaataat

SEQ ID NO: 157390 - DNA, 15 bp, Homo sapiens
ttaggtgaaataatc

SEQ ID NO: 157391 - DNA, 15 bp, Homo sapiens
taggtgaaataatcc

SEQ ID NO: 157392 - DNA, 15 bp, Homo sapiens
aggtgaaataatcca

SEQ ID NO: 157393 - DNA, 15 bp, Homo sapiens
ggtgaaataatccac

SEQ ID NO: 157394 - DNA, 15 bp, Homo sapiens
gtgaaataatccacc

SEQ ID NO: 157395 - DNA, 15 bp, Homo sapiens
tgaaataatccaccc

SEQ ID NO: 157396 - DNA, 15 bp, Homo sapiens
gaaataatccaccct

SEQ ID NO: 157397 - DNA, 15 bp, Homo sapiens
aaataatccaccctt

SEQ ID NO: 157398 - DNA, 15 bp, Homo sapiens
aataatccacccttg

SEQ ID NO: 157399 - DNA, 15 bp, Homo sapiens
ataatccacccttgc

SEQ ID NO: 157400 - DNA, 15 bp, Homo sapiens
taatccacccttgca

SEQ ID NO: 157401 - DNA, 15 bp, Homo sapiens
aatccacccttgcaa

SEQ ID NO: 157402 - DNA, 15 bp, Homo sapiens
atccacccttgcaaa

SEQ ID NO: 157403 - DNA, 15 bp, Homo sapiens
tccacccttgcaaaa

SEQ ID NO: 157404 - DNA, 15 bp, Homo sapiens
ccacccttgcaaaaa

SEQ ID NO: 157405 - DNA, 15 bp, Homo sapiens
cacccttgcaaaaat

SEQ ID NO: 157406 - DNA, 15 bp, Homo sapiens
acccttgcaaaaatc

SEQ ID NO: 157407 - DNA, 15 bp, Homo sapiens
cccttgcaaaaatcc

SEQ ID NO: 157408 - DNA, 15 bp, Homo sapiens
ccttgcaaaaatcca

SEQ ID NO: 157409 - DNA, 15 bp, Homo sapiens
cttgcaaaaatccat

SEQ ID NO: 157410 - DNA, 15 bp, Homo sapiens
ttgcaaaaatccatg

SEQ ID NO: 157411 - DNA, 15 bp, Homo sapiens
tgcaaaaatccatga

SEQ ID NO: 157412 - DNA, 15 bp, Homo sapiens
gcaaaaatccatgat

SEQ ID NO: 157413 - DNA, 15 bp, Homo sapiens
caaaaatccatgatt

SEQ ID NO: 157414 - DNA, 15 bp, Homo sapiens
aaaaatccatgatta

SEQ ID NO: 157415 - DNA, 15 bp, Homo sapiens
aaaatccatgattaa

SEQ ID NO: 157416 - DNA, 15 bp, Homo sapiens
aaatccatgattaag

SEQ ID NO: 157417 - DNA, 15 bp, Homo sapiens
aatccatgattaagt

SEQ ID NO: 157418 - DNA, 15 bp, Homo sapiens
atccatgattaagtt

SEQ ID NO: 157419 - DNA, 15 bp, Homo sapiens
tccatgattaagtta

SEQ ID NO: 157420 - DNA, 15 bp, Homo sapiens
ccatgattaagttat

SEQ ID NO: 157421 - DNA, 15 bp, Homo sapiens
catgattaagttata

SEQ ID NO: 157422 - DNA, 15 bp, Homo sapiens
atgattaagttataa

SEQ ID NO: 157423 - DNA, 15 bp, Homo sapiens
tgattaagttataaa

SEQ ID NO: 157424 - DNA, 15 bp, Homo sapiens
gattaagttataaaa

SEQ ID NO: 157425 - DNA, 15 bp, Homo sapiens
attaagttataaaat

SEQ ID NO: 157426 - DNA, 15 bp, Homo sapiens
ttaagttataaaata

SEQ ID NO: 157427 - DNA, 15 bp, Homo sapiens
taagttataaaatat

SEQ ID NO: 157428 - DNA, 15 bp, Homo sapiens
aagttataaaatatt

SEQ ID NO: 157429 - DNA, 15 bp, Homo sapiens
agttataaaatattt

SEQ ID NO: 157430 - DNA, 15 bp, Homo sapiens
gttataaaatatttg

SEQ ID NO: 157431 - DNA, 15 bp, Homo sapiens
ttataaaatatttgg

SEQ ID NO: 157432 - DNA, 15 bp, Homo sapiens
tataaaatatttgga

SEQ ID NO: 157433 - DNA, 15 bp, Homo sapiens
ataaaatatttggat

SEQ ID NO: 157434 - DNA, 15 bp, Homo sapiens
taaaatatttggatt

SEQ ID NO: 157435 - DNA, 15 bp, Homo sapiens
aaaatatttggattt

SEQ ID NO: 157436 - DNA, 15 bp, Homo sapiens
aaatatttggatttg

SEQ ID NO: 157437 - DNA, 15 bp, Homo sapiens
aatatttggatttgt

SEQ ID NO: 157438 - DNA, 15 bp, Homo sapiens
atatttggatttgtg

SEQ ID NO: 157439 - DNA, 15 bp, Homo sapiens
tatttggatttgtgg

SEQ ID NO: 157440 - DNA, 15 bp, Homo sapiens
atttggatttgtgga

SEQ ID NO: 157441 - DNA, 15 bp, Homo sapiens
tttggatttgtggag

SEQ ID NO: 157442 - DNA, 15 bp, Homo sapiens
ttggatttgtggagc

SEQ ID NO: 157443 - DNA, 15 bp, Homo sapiens
tggatttgtggagct

SEQ ID NO: 157444 - DNA, 15 bp, Homo sapiens
ggatttgtggagctg

SEQ ID NO: 157445 - DNA, 15 bp, Homo sapiens
gatttgtggagctgt

SEQ ID NO: 157446 - DNA, 15 bp, Homo sapiens
atttgtggagctgtg

SEQ ID NO: 157447 - DNA, 15 bp, Homo sapiens
tttgtggagctgtgt

SEQ ID NO: 157448 - DNA, 15 bp, Homo sapiens
ttgtggagctgtgtt

SEQ ID NO: 157449 - DNA, 15 bp, Homo sapiens
tgtggagctgtgttt

SEQ ID NO: 157450 - DNA, 15 bp, Homo sapiens
gtggagctgtgtttt

SEQ ID NO: 157451 - DNA, 15 bp, Homo sapiens
tggagctgtgtttta

SEQ ID NO: 157452 - DNA, 15 bp, Homo sapiens
ggagctgtgttttaa

SEQ ID NO: 157453 - DNA, 15 bp, Homo sapiens
gagctgtgttttaat

SEQ ID NO: 157454 - DNA, 15 bp, Homo sapiens
agctgtgttttaatt

SEQ ID NO: 157455 - DNA, 15 bp, Homo sapiens
gctgtgttttaattc

SEQ ID NO: 157456 - DNA, 15 bp, Homo sapiens
ctgtgttttaattct

SEQ ID NO: 157457 - DNA, 15 bp, Homo sapiens
tgtgttttaattctg

SEQ ID NO: 157458 - DNA, 15 bp, Homo sapiens
gtgttttaattctgt

SEQ ID NO: 157459 - DNA, 15 bp, Homo sapiens
tgttttaattctgta

SEQ ID NO: 157460 - DNA, 15 bp, Homo sapiens
gttttaattctgtaa

SEQ ID NO: 157461 - DNA, 15 bp, Homo sapiens
ttttaattctgtaac

SEQ ID NO: 157462 - DNA, 15 bp, Homo sapiens
tttaattctgtaact

SEQ ID NO: 157463 - DNA, 15 bp, Homo sapiens
ttaattctgtaactg

SEQ ID NO: 157464 - DNA, 15 bp, Homo sapiens
taattctgtaactga

SEQ ID NO: 157465 - DNA, 15 bp, Homo sapiens
aattctgtaactgag

SEQ ID NO: 157466 - DNA, 15 bp, Homo sapiens
attctgtaactgagt

SEQ ID NO: 157467 - DNA, 15 bp, Homo sapiens
ttctgtaactgagtc

SEQ ID NO: 157468 - DNA, 15 bp, Homo sapiens
tctgtaactgagtca

SEQ ID NO: 157469 - DNA, 15 bp, Homo sapiens
ctgtaactgagtcac

SEQ ID NO: 157470 - DNA, 15 bp, Homo sapiens
tgtaactgagtcaca

SEQ ID NO: 157471 - DNA, 15 bp, Homo sapiens
gtaactgagtcacag

SEQ ID NO: 157472 - DNA, 15 bp, Homo sapiens
taactgagtcacagg

SEQ ID NO: 157473 - DNA, 15 bp, Homo sapiens
aactgagtcacaggg

SEQ ID NO: 157474 - DNA, 15 bp, Homo sapiens
actgagtcacagggc

SEQ ID NO: 157475 - DNA, 15 bp, Homo sapiens
ctgagtcacagggca

SEQ ID NO: 157476 - DNA, 15 bp, Homo sapiens
tgagtcacagggcac

SEQ ID NO: 157477 - DNA, 15 bp, Homo sapiens
gagtcacagggcaca

SEQ ID NO: 157478 - DNA, 15 bp, Homo sapiens
agtcacagggcacac

SEQ ID NO: 157479 - DNA, 15 bp, Homo sapiens
gtcacagggcacact

SEQ ID NO: 157480 - DNA, 15 bp, Homo sapiens
tcacagggcacactg

SEQ ID NO: 157481 - DNA, 15 bp, Homo sapiens
cacagggcacactgt

SEQ ID NO: 157482 - DNA, 15 bp, Homo sapiens
acagggcacactgtc

SEQ ID NO: 157483 - DNA, 15 bp, Homo sapiens
cagggcacactgtca

SEQ ID NO: 157484 - DNA, 15 bp, Homo sapiens
agggcacactgtcaa

SEQ ID NO: 157485 - DNA, 15 bp, Homo sapiens
gggcacactgtcaaa

SEQ ID NO: 157486 - DNA, 15 bp, Homo sapiens
ggcacactgtcaaag

SEQ ID NO: 157487 - DNA, 15 bp, Homo sapiens
gcacactgtcaaagc

SEQ ID NO: 157488 - DNA, 15 bp, Homo sapiens
cacactgtcaaagca

SEQ ID NO: 157489 - DNA, 15 bp, Homo sapiens
acactgtcaaagcat

SEQ ID NO: 157490 - DNA, 15 bp, Homo sapiens
cactgtcaaagcata

SEQ ID NO: 157491 - DNA, 15 bp, Homo sapiens
actgtcaaagcatag

SEQ ID NO: 157492 - DNA, 15 bp, Homo sapiens
ctgtcaaagcataga

SEQ ID NO: 157493 - DNA, 15 bp, Homo sapiens
tgtcaaagcatagaa

SEQ ID NO: 157494 - DNA, 15 bp, Homo sapiens
gtcaaagcatagaac

SEQ ID NO: 157495 - DNA, 15 bp, Homo sapiens
tcaaagcatagaacc

SEQ ID NO: 157496 - DNA, 15 bp, Homo sapiens
caaagcatagaacct

SEQ ID NO: 157497 - DNA, 15 bp, Homo sapiens
aaagcatagaacctc

SEQ ID NO: 157498 - DNA, 15 bp, Homo sapiens
aagcatagaacctcc

SEQ ID NO: 157499 - DNA, 15 bp, Homo sapiens
agcatagaacctcca

SEQ ID NO: 157500 - DNA, 15 bp, Homo sapiens
gcatagaacctccag

SEQ ID NO: 157501 - DNA, 15 bp, Homo sapiens
catagaacctccaga

SEQ ID NO: 157502 - DNA, 15 bp, Homo sapiens
atagaacctccagag

SEQ ID NO: 157503 - DNA, 15 bp, Homo sapiens
tagaacctccagaga

SEQ ID NO: 157504 - DNA, 15 bp, Homo sapiens
agaacctccagagac

SEQ ID NO: 157505 - DNA, 15 bp, Homo sapiens
gaacctccagagact

SEQ ID NO: 157506 - DNA, 15 bp, Homo sapiens
aacctccagagactt

SEQ ID NO: 157507 - DNA, 15 bp, Homo sapiens
acctccagagacttg

SEQ ID NO: 157508 - DNA, 15 bp, Homo sapiens
cctccagagacttgt

SEQ ID NO: 157509 - DNA, 15 bp, Homo sapiens
ctccagagacttgtt

SEQ ID NO: 157510 - DNA, 15 bp, Homo sapiens
tccagagacttgttt

SEQ ID NO: 157511 - DNA, 15 bp, Homo sapiens
ccagagacttgtttt

SEQ ID NO: 157512 - DNA, 15 bp, Homo sapiens
cagagacttgttttc

SEQ ID NO: 157513 - DNA, 15 bp, Homo sapiens
agagacttgttttct

SEQ ID NO: 157514 - DNA, 15 bp, Homo sapiens
gagacttgttttctg

SEQ ID NO: 157515 - DNA, 15 bp, Homo sapiens
agacttgttttctgc

SEQ ID NO: 157516 - DNA, 15 bp, Homo sapiens
gacttgttttctgca

SEQ ID NO: 157517 - DNA, 15 bp, Homo sapiens
acttgttttctgcaa

SEQ ID NO: 157518 - DNA, 15 bp, Homo sapiens
cttgttttctgcaaa

SEQ ID NO: 157519 - DNA, 15 bp, Homo sapiens
ttgttttctgcaaag

SEQ ID NO: 157520 - DNA, 15 bp, Homo sapiens
tgttttctgcaaagt

SEQ ID NO: 157521 - DNA, 15 bp, Homo sapiens
gttttctgcaaagta

SEQ ID NO: 157522 - DNA, 15 bp, Homo sapiens
ttttctgcaaagtat

SEQ ID NO: 157523 - DNA, 15 bp, Homo sapiens
tttctgcaaagtata

SEQ ID NO: 157524 - DNA, 15 bp, Homo sapiens
ttctgcaaagtataa

SEQ ID NO: 157525 - DNA, 15 bp, Homo sapiens
tctgcaaagtataat

SEQ ID NO: 157526 - DNA, 15 bp, Homo sapiens
ctgcaaagtataatt

SEQ ID NO: 157527 - DNA, 15 bp, Homo sapiens
tgcaaagtataattc

SEQ ID NO: 157528 - DNA, 15 bp, Homo sapiens
gcaaagtataattca

SEQ ID NO: 157529 - DNA, 15 bp, Homo sapiens
caaagtataattcat

SEQ ID NO: 157530 - DNA, 15 bp, Homo sapiens
aaagtataattcatg

SEQ ID NO: 157531 - DNA, 15 bp, Homo sapiens
aagtataattcatgt

SEQ ID NO: 157532 - DNA, 15 bp, Homo sapiens
agtataattcatgta

SEQ ID NO: 157533 - DNA, 15 bp, Homo sapiens
gtataattcatgtaa

SEQ ID NO: 157534 - DNA, 15 bp, Homo sapiens
tataattcatgtaat

SEQ ID NO: 157535 - DNA, 15 bp, Homo sapiens
ataattcatgtaatt

SEQ ID NO: 157536 - DNA, 15 bp, Homo sapiens
taattcatgtaatta

SEQ ID NO: 157537 - DNA, 15 bp, Homo sapiens
aattcatgtaattat

SEQ ID NO: 157538 - DNA, 15 bp, Homo sapiens
attcatgtaattatt

SEQ ID NO: 157539 - DNA, 15 bp, Homo sapiens
ttcatgtaattatta

SEQ ID NO: 157540 - DNA, 15 bp, Homo sapiens
tcatgtaattattat

SEQ ID NO: 157541 - DNA, 15 bp, Homo sapiens
catgtaattattatc

SEQ ID NO: 157542 - DNA, 15 bp, Homo sapiens
atgtaattattatct

SEQ ID NO: 157543 - DNA, 15 bp, Homo sapiens
tgtaattattatcta

SEQ ID NO: 157544 - DNA, 15 bp, Homo sapiens
gtaattattatctat

SEQ ID NO: 157545 - DNA, 15 bp, Homo sapiens
taattattatctatt

SEQ ID NO: 157546 - DNA, 15 bp, Homo sapiens
aattattatctattc

SEQ ID NO: 157547 - DNA, 15 bp, Homo sapiens
attattatctattct

SEQ ID NO: 157548 - DNA, 15 bp, Homo sapiens
ttattatctattctg

SEQ ID NO: 157549 - DNA, 15 bp, Homo sapiens
tattatctattctgt

SEQ ID NO: 157550 - DNA, 15 bp, Homo sapiens
attatctattctgtt

SEQ ID NO: 157551 - DNA, 15 bp, Homo sapiens
ttatctattctgtta

SEQ ID NO: 157552 - DNA, 15 bp, Homo sapiens
tatctattctgttat

SEQ ID NO: 157553 - DNA, 15 bp, Homo sapiens
atctattctgttata

SEQ ID NO: 157554 - DNA, 15 bp, Homo sapiens
tctattctgttatat

SEQ ID NO: 157555 - DNA, 15 bp, Homo sapiens
ctattctgttatatt

SEQ ID NO: 157556 - DNA, 15 bp, Homo sapiens
tattctgttatattt

SEQ ID NO: 157557 - DNA, 15 bp, Homo sapiens
attctgttatatttg

SEQ ID NO: 157558 - DNA, 15 bp, Homo sapiens
ttctgttatatttgg

SEQ ID NO: 157559 - DNA, 15 bp, Homo sapiens
tctgttatatttggg

SEQ ID NO: 157560 - DNA, 15 bp, Homo sapiens
ctgttatatttggga

SEQ ID NO: 157561 - DNA, 15 bp, Homo sapiens
tgttatatttgggat

SEQ ID NO: 157562 - DNA, 15 bp, Homo sapiens
gttatatttgggatg

SEQ ID NO: 157563 - DNA, 15 bp, Homo sapiens
ttatatttgggatgt

SEQ ID NO: 157564 - DNA, 15 bp, Homo sapiens
tatatttgggatgtt

SEQ ID NO: 157565 - DNA, 15 bp, Homo sapiens
atatttgggatgtta

SEQ ID NO: 157566 - DNA, 15 bp, Homo sapiens
tatttgggatgttag

SEQ ID NO: 157567 - DNA, 15 bp, Homo sapiens
atttgggatgttagg

SEQ ID NO: 157568 - DNA, 15 bp, Homo sapiens
tttgggatgttaggt

SEQ ID NO: 157569 - DNA, 15 bp, Homo sapiens
ttgggatgttaggta

SEQ ID NO: 157570 - DNA, 15 bp, Homo sapiens
tgggatgttaggtag

SEQ ID NO: 157571 - DNA, 15 bp, Homo sapiens
gggatgttaggtagt

SEQ ID NO: 157572 - DNA, 15 bp, Homo sapiens
ggatgttaggtagtg

SEQ ID NO: 157573 - DNA, 15 bp, Homo sapiens
gatgttaggtagtgt

SEQ ID NO: 157574 - DNA, 15 bp, Homo sapiens
atgttaggtagtgtt

SEQ ID NO: 157575 - DNA, 15 bp, Homo sapiens
tgttaggtagtgttt

SEQ ID NO: 157576 - DNA, 15 bp, Homo sapiens
gttaggtagtgtttg

SEQ ID NO: 157577 - DNA, 15 bp, Homo sapiens
ttaggtagtgtttgt

SEQ ID NO: 157578 - DNA, 15 bp, Homo sapiens
taggtagtgtttgtt

SEQ ID NO: 157579 - DNA, 15 bp, Homo sapiens
aggtagtgtttgttc

SEQ ID NO: 157580 - DNA, 15 bp, Homo sapiens
ggtagtgtttgttct

SEQ ID NO: 157581 - DNA, 15 bp, Homo sapiens
gtagtgtttgttctt

SEQ ID NO: 157582 - DNA, 15 bp, Homo sapiens
tagtgtttgttcttt

SEQ ID NO: 157583 - DNA, 15 bp, Homo sapiens
agtgtttgttcttta

SEQ ID NO: 157584 - DNA, 15 bp, Homo sapiens
gtgtttgttctttag

SEQ ID NO: 157585 - DNA, 15 bp, Homo sapiens
tgtttgttctttaga

SEQ ID NO: 157586 - DNA, 15 bp, Homo sapiens
gtttgttctttagat

SEQ ID NO: 157587 - DNA, 15 bp, Homo sapiens
tttgttctttagata

SEQ ID NO: 157588 - DNA, 15 bp, Homo sapiens
ttgttctttagataa

SEQ ID NO: 157589 - DNA, 15 bp, Homo sapiens
tgttctttagataaa

SEQ ID NO: 157590 - DNA, 15 bp, Homo sapiens
gttctttagataaaa

SEQ ID NO: 157591 - DNA, 15 bp, Homo sapiens
ttctttagataaaaa

SEQ ID NO: 157592 - DNA, 15 bp, Homo sapiens
tctttagataaaaat

SEQ ID NO: 157593 - DNA, 15 bp, Homo sapiens
ctttagataaaaata

SEQ ID NO: 157594 - DNA, 15 bp, Homo sapiens
tttagataaaaatat

SEQ ID NO: 157595 - DNA, 15 bp, Homo sapiens
ttagataaaaatatc

SEQ ID NO: 157596 - DNA, 15 bp, Homo sapiens
tagataaaaatatcc

SEQ ID NO: 157597 - DNA, 15 bp, Homo sapiens
agataaaaatatccc

SEQ ID NO: 157598 - DNA, 15 bp, Homo sapiens
gataaaaatatcccc

SEQ ID NO: 157599 - DNA, 15 bp, Homo sapiens
ataaaaatatccccc

SEQ ID NO: 157600 - DNA, 15 bp, Homo sapiens
taaaaatatccccca

SEQ ID NO: 157601 - DNA, 15 bp, Homo sapiens
aaaaatatcccccac

SEQ ID NO: 157602 - DNA, 15 bp, Homo sapiens
aaaatatcccccact

SEQ ID NO: 157603 - DNA, 15 bp, Homo sapiens
aaatatcccccactc

SEQ ID NO: 157604 - DNA, 15 bp, Homo sapiens
aatatcccccactct

SEQ ID NO: 157605 - DNA, 15 bp, Homo sapiens
atatcccccactctg

SEQ ID NO: 157606 - DNA, 15 bp, Homo sapiens
tatcccccactctgt

SEQ ID NO: 157607 - DNA, 15 bp, Homo sapiens
atcccccactctgta

SEQ ID NO: 157608 - DNA, 15 bp, Homo sapiens
tcccccactctgtaa

SEQ ID NO: 157609 - DNA, 15 bp, Homo sapiens
cccccactctgtaac

SEQ ID NO: 157610 - DNA, 15 bp, Homo sapiens
ccccactctgtaaca

SEQ ID NO: 157611 - DNA, 15 bp, Homo sapiens
cccactctgtaacaa

SEQ ID NO: 157612 - DNA, 15 bp, Homo sapiens
ccactctgtaacaat

SEQ ID NO: 157613 - DNA, 15 bp, Homo sapiens
cactctgtaacaata

SEQ ID NO: 157614 - DNA, 15 bp, Homo sapiens
actctgtaacaatac

SEQ ID NO: 157615 - DNA, 15 bp, Homo sapiens
ctctgtaacaataca

SEQ ID NO: 157616 - DNA, 15 bp, Homo sapiens
tctgtaacaatacat

SEQ ID NO: 157617 - DNA, 15 bp, Homo sapiens
ctgtaacaatacatt

SEQ ID NO: 157618 - DNA, 15 bp, Homo sapiens
tgtaacaatacatta

SEQ ID NO: 157619 - DNA, 15 bp, Homo sapiens
gtaacaatacattaa

SEQ ID NO: 157620 - DNA, 15 bp, Homo sapiens
taacaatacattaaa

SEQ ID NO: 157621 - DNA, 15 bp, Homo sapiens
aacaatacattaaat

SEQ ID NO: 157622 - DNA, 15 bp, Homo sapiens
acaatacattaaatc

SEQ ID NO: 157623 - DNA, 15 bp, Homo sapiens
caatacattaaatca

SEQ ID NO: 157624 - DNA, 15 bp, Homo sapiens
aatacattaaatcaa

SEQ ID NO: 157625 - DNA, 15 bp, Homo sapiens
atacattaaatcaaa

SEQ ID NO: 157626 - DNA, 15 bp, Homo sapiens
tacattaaatcaaag

SEQ ID NO: 157627 - DNA, 15 bp, Homo sapiens
acattaaatcaaaga

SEQ ID NO: 157628 - DNA, 15 bp, Homo sapiens
cattaaatcaaagaa

SEQ ID NO: 157629 - DNA, 15 bp, Homo sapiens
attaaatcaaagaaa

SEQ ID NO: 157630 - DNA, 15 bp, Homo sapiens
ttaaatcaaagaaaa

SEQ ID NO: 157631 - DNA, 15 bp, Homo sapiens
taaatcaaagaaaag

SEQ ID NO: 157632 - DNA, 15 bp, Homo sapiens
aaatcaaagaaaagg

SEQ ID NO: 157633 - DNA, 15 bp, Homo sapiens
aatcaaagaaaagga

SEQ ID NO: 157634 - DNA, 15 bp, Homo sapiens
atcaaagaaaaggac

SEQ ID NO: 157635 - DNA, 15 bp, Homo sapiens
tcaaagaaaaggaca

SEQ ID NO: 157636 - DNA, 15 bp, Homo sapiens
caaagaaaaggacaa

SEQ ID NO: 157637 - DNA, 15 bp, Homo sapiens
aaagaaaaggacaaa

SEQ ID NO: 157638 - DNA, 15 bp, Homo sapiens
aagaaaaggacaaag

SEQ ID NO: 157639 - DNA, 15 bp, Homo sapiens
agaaaaggacaaagg

SEQ ID NO: 157640 - DNA, 15 bp, Homo sapiens
gaaaaggacaaagga

SEQ ID NO: 157641 - DNA, 15 bp, Homo sapiens
aaaaggacaaaggat

SEQ ID NO: 157642 - DNA, 15 bp, Homo sapiens
aaaggacaaaggatt

SEQ ID NO: 157643 - DNA, 15 bp, Homo sapiens
aaggacaaaggattt

SEQ ID NO: 157644 - DNA, 15 bp, Homo sapiens
aggacaaaggatttt

SEQ ID NO: 157645 - DNA, 15 bp, Homo sapiens
ggacaaaggattttt

SEQ ID NO: 157646 - DNA, 15 bp, Homo sapiens
gacaaaggatttttc

SEQ ID NO: 157647 - DNA, 15 bp, Homo sapiens
acaaaggatttttct

SEQ ID NO: 157648 - DNA, 15 bp, Homo sapiens
caaaggatttttctg

SEQ ID NO: 157649 - DNA, 15 bp, Homo sapiens
aaaggatttttctgg

SEQ ID NO: 157650 - DNA, 15 bp, Homo sapiens
aaggatttttctggg

SEQ ID NO: 157651 - DNA, 15 bp, Homo sapiens
aggatttttctgggt

SEQ ID NO: 157652 - DNA, 15 bp, Homo sapiens
ggatttttctgggtc

SEQ ID NO: 157653 - DNA, 15 bp, Homo sapiens
gatttttctgggtct

SEQ ID NO: 157654 - DNA, 15 bp, Homo sapiens
atttttctgggtctt

SEQ ID NO: 157655 - DNA, 15 bp, Homo sapiens
tttttctgggtcttg

SEQ ID NO: 157656 - DNA, 15 bp, Homo sapiens
ttttctgggtcttgt

SEQ ID NO: 157657 - DNA, 15 bp, Homo sapiens
tttctgggtcttgtt

SEQ ID NO: 157658 - DNA, 15 bp, Homo sapiens
ttctgggtcttgtta

SEQ ID NO: 157659 - DNA, 15 bp, Homo sapiens
tctgggtcttgttag

SEQ ID NO: 157660 - DNA, 15 bp, Homo sapiens
ctgggtcttgttagc

SEQ ID NO: 157661 - DNA, 15 bp, Homo sapiens
tgggtcttgttagca

SEQ ID NO: 157662 - DNA, 15 bp, Homo sapiens
gggtcttgttagcag

SEQ ID NO: 157663 - DNA, 15 bp, Homo sapiens
ggtcttgttagcagg

SEQ ID NO: 157664 - DNA, 15 bp, Homo sapiens
gtcttgttagcagga

SEQ ID NO: 157665 - DNA, 15 bp, Homo sapiens
tcttgttagcaggag

SEQ ID NO: 157666 - DNA, 15 bp, Homo sapiens
cttgttagcaggagc

SEQ ID NO: 157667 - DNA, 15 bp, Homo sapiens
ttgttagcaggagct

SEQ ID NO: 157668 - DNA, 15 bp, Homo sapiens
tgttagcaggagctt

SEQ ID NO: 157669 - DNA, 15 bp, Homo sapiens
gttagcaggagcttt

SEQ ID NO: 157670 - DNA, 15 bp, Homo sapiens
ttagcaggagctttc

SEQ ID NO: 157671 - DNA, 15 bp, Homo sapiens
tagcaggagctttct

SEQ ID NO: 157672 - DNA, 15 bp, Homo sapiens
agcaggagctttctt

SEQ ID NO: 157673 - DNA, 15 bp, Homo sapiens
gcaggagctttcttc

SEQ ID NO: 157674 - DNA, 15 bp, Homo sapiens
caggagctttcttca

SEQ ID NO: 157675 - DNA, 15 bp, Homo sapiens
aggagctttcttcag

SEQ ID NO: 157676 - DNA, 15 bp, Homo sapiens
ggagctttcttcagt

SEQ ID NO: 157677 - DNA, 15 bp, Homo sapiens
gagctttcttcagtc

SEQ ID NO: 157678 - DNA, 15 bp, Homo sapiens
agctttcttcagtcc

SEQ ID NO: 157679 - DNA, 15 bp, Homo sapiens
gctttcttcagtcct

SEQ ID NO: 157680 - DNA, 15 bp, Homo sapiens
ctttcttcagtcctg

SEQ ID NO: 157681 - DNA, 15 bp, Homo sapiens
tttcttcagtcctga

SEQ ID NO: 157682 - DNA, 15 bp, Homo sapiens
ttcttcagtcctgaa

SEQ ID NO: 157683 - DNA, 15 bp, Homo sapiens
tcttcagtcctgaaa

SEQ ID NO: 157684 - DNA, 15 bp, Homo sapiens
cttcagtcctgaaag

SEQ ID NO: 157685 - DNA, 15 bp, Homo sapiens
ttcagtcctgaaaga

SEQ ID NO: 157686 - DNA, 15 bp, Homo sapiens
tcagtcctgaaagat

SEQ ID NO: 157687 - DNA, 15 bp, Homo sapiens
cagtcctgaaagatt

SEQ ID NO: 157688 - DNA, 15 bp, Homo sapiens
agtcctgaaagattt

SEQ ID NO: 157689 - DNA, 15 bp, Homo sapiens
gtcctgaaagatttg

SEQ ID NO: 157690 - DNA, 15 bp, Homo sapiens
tcctgaaagatttgt

SEQ ID NO: 157691 - DNA, 15 bp, Homo sapiens
cctgaaagatttgta

SEQ ID NO: 157692 - DNA, 15 bp, Homo sapiens
ctgaaagatttgtag

SEQ ID NO: 157693 - DNA, 15 bp, Homo sapiens
tgaaagatttgtaga

SEQ ID NO: 157694 - DNA, 15 bp, Homo sapiens
gaaagatttgtagac

SEQ ID NO: 157695 - DNA, 15 bp, Homo sapiens
aaagatttgtagacc

SEQ ID NO: 157696 - DNA, 15 bp, Homo sapiens
aagatttgtagacct

SEQ ID NO: 157697 - DNA, 15 bp, Homo sapiens
agatttgtagacctg

SEQ ID NO: 157698 - DNA, 15 bp, Homo sapiens
gatttgtagacctgt

SEQ ID NO: 157699 - DNA, 15 bp, Homo sapiens
atttgtagacctgta

SEQ ID NO: 157700 - DNA, 15 bp, Homo sapiens
tttgtagacctgtag

SEQ ID NO: 157701 - DNA, 15 bp, Homo sapiens
ttgtagacctgtaga

SEQ ID NO: 157702 - DNA, 15 bp, Homo sapiens
tgtagacctgtagat

SEQ ID NO: 157703 - DNA, 15 bp, Homo sapiens
gtagacctgtagatg

SEQ ID NO: 157704 - DNA, 15 bp, Homo sapiens
tagacctgtagatgg

SEQ ID NO: 157705 - DNA, 15 bp, Homo sapiens
agacctgtagatggg

SEQ ID NO: 157706 - DNA, 15 bp, Homo sapiens
gacctgtagatgggg

SEQ ID NO: 157707 - DNA, 15 bp, Homo sapiens
acctgtagatggggg

SEQ ID NO: 157708 - DNA, 15 bp, Homo sapiens
cctgtagatggggga

SEQ ID NO: 157709 - DNA, 15 bp, Homo sapiens
ctgtagatgggggaa

SEQ ID NO: 157710 - DNA, 15 bp, Homo sapiens
tgtagatgggggaac

SEQ ID NO: 157711 - DNA, 15 bp, Homo sapiens
gtagatgggggaact

SEQ ID NO: 157712 - DNA, 15 bp, Homo sapiens
tagatgggggaactg

SEQ ID NO: 157713 - DNA, 15 bp, Homo sapiens
agatgggggaactgt

SEQ ID NO: 157714 - DNA, 15 bp, Homo sapiens
gatgggggaactgtg

SEQ ID NO: 157715 - DNA, 15 bp, Homo sapiens
atgggggaactgtgt

SEQ ID NO: 157716 - DNA, 15 bp, Homo sapiens
tgggggaactgtgtc

SEQ ID NO: 157717 - DNA, 15 bp, Homo sapiens
gggggaactgtgtca

SEQ ID NO: 157718 - DNA, 15 bp, Homo sapiens
ggggaactgtgtcag

SEQ ID NO: 157719 - DNA, 15 bp, Homo sapiens
gggaactgtgtcagt

SEQ ID NO: 157720 - DNA, 15 bp, Homo sapiens
ggaactgtgtcagtg

SEQ ID NO: 157721 - DNA, 15 bp, Homo sapiens
gaactgtgtcagtga

SEQ ID NO: 157722 - DNA, 15 bp, Homo sapiens
aactgtgtcagtgat

SEQ ID NO: 157723 - DNA, 15 bp, Homo sapiens
actgtgtcagtgata

SEQ ID NO: 157724 - DNA, 15 bp, Homo sapiens
ctgtgtcagtgatac

SEQ ID NO: 157725 - DNA, 15 bp, Homo sapiens
tgtgtcagtgataca

SEQ ID NO: 157726 - DNA, 15 bp, Homo sapiens
gtgtcagtgatacaa

SEQ ID NO: 157727 - DNA, 15 bp, Homo sapiens
tgtcagtgatacaaa

SEQ ID NO: 157728 - DNA, 15 bp, Homo sapiens
gtcagtgatacaaaa

SEQ ID NO: 157729 - DNA, 15 bp, Homo sapiens
tcagtgatacaaaag

SEQ ID NO: 157730 - DNA, 15 bp, Homo sapiens
cagtgatacaaaagg

SEQ ID NO: 157731 - DNA, 15 bp, Homo sapiens
agtgatacaaaaggg

SEQ ID NO: 157732 - DNA, 15 bp, Homo sapiens
gtgatacaaaaggga

SEQ ID NO: 157733 - DNA, 15 bp, Homo sapiens
tgatacaaaagggaa

SEQ ID NO: 157734 - DNA, 15 bp, Homo sapiens
gatacaaaagggaag

SEQ ID NO: 157735 - DNA, 15 bp, Homo sapiens
atacaaaagggaagc

SEQ ID NO: 157736 - DNA, 15 bp, Homo sapiens
tacaaaagggaagca

SEQ ID NO: 157737 - DNA, 15 bp, Homo sapiens
acaaaagggaagcat

SEQ ID NO: 157738 - DNA, 15 bp, Homo sapiens
caaaagggaagcatt

SEQ ID NO: 157739 - DNA, 15 bp, Homo sapiens
aaaagggaagcattt

SEQ ID NO: 157740 - DNA, 15 bp, Homo sapiens
aaagggaagcattta

SEQ ID NO: 157741 - DNA, 15 bp, Homo sapiens
aagggaagcatttaa

SEQ ID NO: 157742 - DNA, 15 bp, Homo sapiens
agggaagcatttaaa

SEQ ID NO: 157743 - DNA, 15 bp, Homo sapiens
gggaagcatttaaaa

SEQ ID NO: 157744 - DNA, 15 bp, Homo sapiens
ggaagcatttaaaaa

SEQ ID NO: 157745 - DNA, 15 bp, Homo sapiens
gaagcatttaaaaaa

SEQ ID NO: 157746 - DNA, 15 bp, Homo sapiens
aagcatttaaaaaaa

SEQ ID NO: 157747 - DNA, 15 bp, Homo sapiens
agcatttaaaaaaaa

SEQ ID NO: 157748 - DNA, 15 bp, Homo sapiens
gcatttaaaaaaaaa

SEQ ID NO: 157749 - DNA, 15 bp, Homo sapiens
catttaaaaaaaaaa

SEQ ID NO: 157750 - DNA, 15 bp, Homo sapiens
taaaaaaaaaaaagt

SEQ ID NO: 157751 - DNA, 15 bp, Homo sapiens
aaaaaaaaaaaagta

SEQ ID NO: 157752 - DNA, 15 bp, Homo sapiens
aaaaaaaaaaagtat

SEQ ID NO: 157753 - DNA, 15 bp, Homo sapiens
aaaaaaaaaagtata

SEQ ID NO: 157754 - DNA, 15 bp, Homo sapiens
aaaaaaaaagtatat

SEQ ID NO: 157755 - DNA, 15 bp, Homo sapiens
aaaaaaaagtatata

SEQ ID NO: 157756 - DNA, 15 bp, Homo sapiens
aaaaaaagtatatat

SEQ ID NO: 157757 - DNA, 15 bp, Homo sapiens
aaaaaagtatatata

SEQ ID NO: 157758 - DNA, 15 bp, Homo sapiens
aaaaagtatatatat

SEQ ID NO: 157759 - DNA, 15 bp, Homo sapiens
aaaagtatatatata

SEQ ID NO: 157760 - DNA, 15 bp, Homo sapiens
atatatatatatatg

SEQ ID NO: 157761 - DNA, 15 bp, Homo sapiens
tatatatatatatgt

SEQ ID NO: 157762 - DNA, 15 bp, Homo sapiens
atatatatatatgta

SEQ ID NO: 157763 - DNA, 15 bp, Homo sapiens
tatatatatatgtaa

SEQ ID NO: 157764 - DNA, 15 bp, Homo sapiens
atatatatatgtaat

SEQ ID NO: 157765 - DNA, 15 bp, Homo sapiens
tatatatatgtaatg

SEQ ID NO: 157766 - DNA, 15 bp, Homo sapiens
atatatatgtaatgt

SEQ ID NO: 157767 - DNA, 15 bp, Homo sapiens
tatatatgtaatgtg

SEQ ID NO: 157768 - DNA, 15 bp, Homo sapiens
atatatgtaatgtga

SEQ ID NO: 157769 - DNA, 15 bp, Homo sapiens
tatatgtaatgtgaa

SEQ ID NO: 157770 - DNA, 15 bp, Homo sapiens
atatgtaatgtgaat

SEQ ID NO: 157771 - DNA, 15 bp, Homo sapiens
tatgtaatgtgaatt

SEQ ID NO: 157772 - DNA, 15 bp, Homo sapiens
atgtaatgtgaattg

SEQ ID NO: 157773 - DNA, 15 bp, Homo sapiens
tgtaatgtgaattgg

SEQ ID NO: 157774 - DNA, 15 bp, Homo sapiens
gtaatgtgaattggc

SEQ ID NO: 157775 - DNA, 15 bp, Homo sapiens
taatgtgaattggcc

SEQ ID NO: 157776 - DNA, 15 bp, Homo sapiens
aatgtgaattggcct

SEQ ID NO: 157777 - DNA, 15 bp, Homo sapiens
atgtgaattggcctc

SEQ ID NO: 157778 - DNA, 15 bp, Homo sapiens
tgtgaattggcctct

SEQ ID NO: 157779 - DNA, 15 bp, Homo sapiens
gtgaattggcctctt

SEQ ID NO: 157780 - DNA, 15 bp, Homo sapiens
tgaattggcctcttt

SEQ ID NO: 157781 - DNA, 15 bp, Homo sapiens
gaattggcctctttt

SEQ ID NO: 157782 - DNA, 15 bp, Homo sapiens
aattggcctcttttt

SEQ ID NO: 157783 - DNA, 15 bp, Homo sapiens
attggcctctttttc

SEQ ID NO: 157784 - DNA, 15 bp, Homo sapiens
ttggcctctttttct

SEQ ID NO: 157785 - DNA, 15 bp, Homo sapiens
tggcctctttttctc

SEQ ID NO: 157786 - DNA, 15 bp, Homo sapiens
ggcctctttttctct

SEQ ID NO: 157787 - DNA, 15 bp, Homo sapiens
gcctctttttctcta

SEQ ID NO: 157788 - DNA, 15 bp, Homo sapiens
cctctttttctctaa

SEQ ID NO: 157789 - DNA, 15 bp, Homo sapiens
ctctttttctctaag

SEQ ID NO: 157790 - DNA, 15 bp, Homo sapiens
tctttttctctaagc

SEQ ID NO: 157791 - DNA, 15 bp, Homo sapiens
ctttttctctaagcc

SEQ ID NO: 157792 - DNA, 15 bp, Homo sapiens
tttttctctaagccc

SEQ ID NO: 157793 - DNA, 15 bp, Homo sapiens
ttttctctaagccca

SEQ ID NO: 157794 - DNA, 15 bp, Homo sapiens
tttctctaagcccac

SEQ ID NO: 157795 - DNA, 15 bp, Homo sapiens
ttctctaagcccaca

SEQ ID NO: 157796 - DNA, 15 bp, Homo sapiens
tctctaagcccacat

SEQ ID NO: 157797 - DNA, 15 bp, Homo sapiens
ctctaagcccacatt

SEQ ID NO: 157798 - DNA, 15 bp, Homo sapiens
tctaagcccacattt

SEQ ID NO: 157799 - DNA, 15 bp, Homo sapiens
ctaagcccacatttt

SEQ ID NO: 157800 - DNA, 15 bp, Homo sapiens
taagcccacattttc

SEQ ID NO: 157801 - DNA, 15 bp, Homo sapiens
aagcccacattttct

SEQ ID NO: 157802 - DNA, 15 bp, Homo sapiens
agcccacattttctt

SEQ ID NO: 157803 - DNA, 15 bp, Homo sapiens
gcccacattttcttc

SEQ ID NO: 157804 - DNA, 15 bp, Homo sapiens
cccacattttcttct

SEQ ID NO: 157805 - DNA, 15 bp, Homo sapiens
ccacattttcttctt

SEQ ID NO: 157806 - DNA, 15 bp, Homo sapiens
cacattttcttctta

SEQ ID NO: 157807 - DNA, 15 bp, Homo sapiens
acattttcttcttac

SEQ ID NO: 157808 - DNA, 15 bp, Homo sapiens
cattttcttcttaca

SEQ ID NO: 157809 - DNA, 15 bp, Homo sapiens
attttcttcttacat

SEQ ID NO: 157810 - DNA, 15 bp, Homo sapiens
ttttcttcttacata

SEQ ID NO: 157811 - DNA, 15 bp, Homo sapiens
tttcttcttacatag

SEQ ID NO: 157812 - DNA, 15 bp, Homo sapiens
ttcttcttacatagt

SEQ ID NO: 157813 - DNA, 15 bp, Homo sapiens
tcttcttacatagtt

SEQ ID NO: 157814 - DNA, 15 bp, Homo sapiens
cttcttacatagttc

SEQ ID NO: 157815 - DNA, 15 bp, Homo sapiens
ttcttacatagttca

SEQ ID NO: 157816 - DNA, 15 bp, Homo sapiens
tcttacatagttcag

SEQ ID NO: 157817 - DNA, 15 bp, Homo sapiens
cttacatagttcagg

SEQ ID NO: 157818 - DNA, 15 bp, Homo sapiens
ttacatagttcaggt

SEQ ID NO: 157819 - DNA, 15 bp, Homo sapiens
tacatagttcaggtt

SEQ ID NO: 157820 - DNA, 15 bp, Homo sapiens
acatagttcaggttt

SEQ ID NO: 157821 - DNA, 15 bp, Homo sapiens
catagttcaggttta

SEQ ID NO: 157822 - DNA, 15 bp, Homo sapiens
atagttcaggtttac

SEQ ID NO: 157823 - DNA, 15 bp, Homo sapiens
tagttcaggtttact

SEQ ID NO: 157824 - DNA, 15 bp, Homo sapiens
agttcaggtttactt

SEQ ID NO: 157825 - DNA, 15 bp, Homo sapiens
gttcaggtttacttt

SEQ ID NO: 157826 - DNA, 15 bp, Homo sapiens
ttcaggtttacttta

SEQ ID NO: 157827 - DNA, 15 bp, Homo sapiens
tcaggtttactttat

SEQ ID NO: 157828 - DNA, 15 bp, Homo sapiens
caggtttactttatt

SEQ ID NO: 157829 - DNA, 15 bp, Homo sapiens
aggtttactttattt

SEQ ID NO: 157830 - DNA, 15 bp, Homo sapiens
ggtttactttatttt

SEQ ID NO: 157831 - DNA, 15 bp, Homo sapiens
gtttactttattttt

SEQ ID NO: 157832 - DNA, 15 bp, Homo sapiens
tttactttatttttt

SEQ ID NO: 157833 - DNA, 15 bp, Homo sapiens
ttactttattttttc

SEQ ID NO: 157834 - DNA, 15 bp, Homo sapiens
tactttattttttcc

SEQ ID NO: 157835 - DNA, 15 bp, Homo sapiens
actttattttttcct

SEQ ID NO: 157836 - DNA, 15 bp, Homo sapiens
ctttattttttcctt

SEQ ID NO: 157837 - DNA, 15 bp, Homo sapiens
tttattttttccttt

SEQ ID NO: 157838 - DNA, 15 bp, Homo sapiens
ttattttttcctttc

SEQ ID NO: 157839 - DNA, 15 bp, Homo sapiens
tattttttcctttcc

SEQ ID NO: 157840 - DNA, 15 bp, Homo sapiens
attttttcctttccg

SEQ ID NO: 157841 - DNA, 15 bp, Homo sapiens
ttttttcctttccgg

SEQ ID NO: 157842 - DNA, 15 bp, Homo sapiens
tttttcctttccggc

SEQ ID NO: 157843 - DNA, 15 bp, Homo sapiens
ttttcctttccggct

SEQ ID NO: 157844 - DNA, 15 bp, Homo sapiens
tttcctttccggctg

SEQ ID NO: 157845 - DNA, 15 bp, Homo sapiens
ttcctttccggctgc

SEQ ID NO: 157846 - DNA, 15 bp, Homo sapiens
tcctttccggctgct

SEQ ID NO: 157847 - DNA, 15 bp, Homo sapiens
cctttccggctgctg

SEQ ID NO: 157848 - DNA, 15 bp, Homo sapiens
ctttccggctgctga

SEQ ID NO: 157849 - DNA, 15 bp, Homo sapiens
tttccggctgctgac

SEQ ID NO: 157850 - DNA, 15 bp, Homo sapiens
ttccggctgctgacc

SEQ ID NO: 157851 - DNA, 15 bp, Homo sapiens
tccggctgctgaccc

SEQ ID NO: 157852 - DNA, 15 bp, Homo sapiens
ccggctgctgaccct

SEQ ID NO: 157853 - DNA, 15 bp, Homo sapiens
cggctgctgaccctg

SEQ ID NO: 157854 - DNA, 15 bp, Homo sapiens
ggctgctgaccctgt

SEQ ID NO: 157855 - DNA, 15 bp, Homo sapiens
gctgctgaccctgta

SEQ ID NO: 157856 - DNA, 15 bp, Homo sapiens
ctgctgaccctgtat

SEQ ID NO: 157857 - DNA, 15 bp, Homo sapiens
tgctgaccctgtatt

SEQ ID NO: 157858 - DNA, 15 bp, Homo sapiens
gctgaccctgtattg

SEQ ID NO: 157859 - DNA, 15 bp, Homo sapiens
ctgaccctgtattgc

SEQ ID NO: 157860 - DNA, 15 bp, Homo sapiens
tgaccctgtattgcc

SEQ ID NO: 157861 - DNA, 15 bp, Homo sapiens
gaccctgtattgccc

SEQ ID NO: 157862 - DNA, 15 bp, Homo sapiens
accctgtattgcccg

SEQ ID NO: 157863 - DNA, 15 bp, Homo sapiens
ccctgtattgcccgt

SEQ ID NO: 157864 - DNA, 15 bp, Homo sapiens
cctgtattgcccgta

SEQ ID NO: 157865 - DNA, 15 bp, Homo sapiens
ctgtattgcccgtag

SEQ ID NO: 157866 - DNA, 15 bp, Homo sapiens
tgtattgcccgtagt

SEQ ID NO: 157867 - DNA, 15 bp, Homo sapiens
gtattgcccgtagtt

SEQ ID NO: 157868 - DNA, 15 bp, Homo sapiens
tattgcccgtagttg

SEQ ID NO: 157869 - DNA, 15 bp, Homo sapiens
attgcccgtagttgt

SEQ ID NO: 157870 - DNA, 15 bp, Homo sapiens
ttgcccgtagttgtg

SEQ ID NO: 157871 - DNA, 15 bp, Homo sapiens
tgcccgtagttgtgg

SEQ ID NO: 157872 - DNA, 15 bp, Homo sapiens
gcccgtagttgtgga

SEQ ID NO: 157873 - DNA, 15 bp, Homo sapiens
cccgtagttgtggaa

SEQ ID NO: 157874 - DNA, 15 bp, Homo sapiens
ccgtagttgtggaac

SEQ ID NO: 157875 - DNA, 15 bp, Homo sapiens
cgtagttgtggaaca

SEQ ID NO: 157876 - DNA, 15 bp, Homo sapiens
gtagttgtggaacat

SEQ ID NO: 157877 - DNA, 15 bp, Homo sapiens
tagttgtggaacata

SEQ ID NO: 157878 - DNA, 15 bp, Homo sapiens
agttgtggaacatag

SEQ ID NO: 157879 - DNA, 15 bp, Homo sapiens
gttgtggaacatagc

SEQ ID NO: 157880 - DNA, 15 bp, Homo sapiens
ttgtggaacatagca

SEQ ID NO: 157881 - DNA, 15 bp, Homo sapiens
tgtggaacatagcat

SEQ ID NO: 157882 - DNA, 15 bp, Homo sapiens
gtggaacatagcatg

SEQ ID NO: 157883 - DNA, 15 bp, Homo sapiens
tggaacatagcatgt

SEQ ID NO: 157884 - DNA, 15 bp, Homo sapiens
ggaacatagcatgtg

SEQ ID NO: 157885 - DNA, 15 bp, Homo sapiens
gaacatagcatgtgt

SEQ ID NO: 157886 - DNA, 15 bp, Homo sapiens
aacatagcatgtgtt

SEQ ID NO: 157887 - DNA, 15 bp, Homo sapiens
acatagcatgtgttt

SEQ ID NO: 157888 - DNA, 15 bp, Homo sapiens
catagcatgtgtttg

SEQ ID NO: 157889 - DNA, 15 bp, Homo sapiens
atagcatgtgtttgt

SEQ ID NO: 157890 - DNA, 15 bp, Homo sapiens
tagcatgtgtttgtg

SEQ ID NO: 157891 - DNA, 15 bp, Homo sapiens
agcatgtgtttgtga

SEQ ID NO: 157892 - DNA, 15 bp, Homo sapiens
gcatgtgtttgtgac

SEQ ID NO: 157893 - DNA, 15 bp, Homo sapiens
catgtgtttgtgacc

SEQ ID NO: 157894 - DNA, 15 bp, Homo sapiens
atgtgtttgtgacct

SEQ ID NO: 157895 - DNA, 15 bp, Homo sapiens
tgtgtttgtgacctg

SEQ ID NO: 157896 - DNA, 15 bp, Homo sapiens
gtgtttgtgacctgt

SEQ ID NO: 157897 - DNA, 15 bp, Homo sapiens
tgtttgtgacctgtg

SEQ ID NO: 157898 - DNA, 15 bp, Homo sapiens
gtttgtgacctgtgc

SEQ ID NO: 157899 - DNA, 15 bp, Homo sapiens
tttgtgacctgtgcc

SEQ ID NO: 157900 - DNA, 15 bp, Homo sapiens
ttgtgacctgtgcct

SEQ ID NO: 157901 - DNA, 15 bp, Homo sapiens
tgtgacctgtgcctg

SEQ ID NO: 157902 - DNA, 15 bp, Homo sapiens
gtgacctgtgcctgt

SEQ ID NO: 157903 - DNA, 15 bp, Homo sapiens
tgacctgtgcctgtt

SEQ ID NO: 157904 - DNA, 15 bp, Homo sapiens
gacctgtgcctgtta

SEQ ID NO: 157905 - DNA, 15 bp, Homo sapiens
acctgtgcctgttat

SEQ ID NO: 157906 - DNA, 15 bp, Homo sapiens
cctgtgcctgttatt

SEQ ID NO: 157907 - DNA, 15 bp, Homo sapiens
ctgtgcctgttattt

SEQ ID NO: 157908 - DNA, 15 bp, Homo sapiens
tgtgcctgttatttt

SEQ ID NO: 157909 - DNA, 15 bp, Homo sapiens
gtgcctgttattttt

SEQ ID NO: 157910 - DNA, 15 bp, Homo sapiens
tgcctgttatttttg

SEQ ID NO: 157911 - DNA, 15 bp, Homo sapiens
gcctgttatttttgt

SEQ ID NO: 157912 - DNA, 15 bp, Homo sapiens
cctgttatttttgtg

SEQ ID NO: 157913 - DNA, 15 bp, Homo sapiens
ctgttatttttgtgc

SEQ ID NO: 157914 - DNA, 15 bp, Homo sapiens
tgttatttttgtgct

SEQ ID NO: 157915 - DNA, 15 bp, Homo sapiens
gttatttttgtgctt

SEQ ID NO: 157916 - DNA, 15 bp, Homo sapiens
ttatttttgtgcttt

SEQ ID NO: 157917 - DNA, 15 bp, Homo sapiens
tatttttgtgctttc

SEQ ID NO: 157918 - DNA, 15 bp, Homo sapiens
atttttgtgctttct

SEQ ID NO: 157919 - DNA, 15 bp, Homo sapiens
tttttgtgctttcta

SEQ ID NO: 157920 - DNA, 15 bp, Homo sapiens
ttttgtgctttctag

SEQ ID NO: 157921 - DNA, 15 bp, Homo sapiens
tttgtgctttctagt

SEQ ID NO: 157922 - DNA, 15 bp, Homo sapiens
ttgtgctttctagtt

SEQ ID NO: 157923 - DNA, 15 bp, Homo sapiens
tgtgctttctagttg

SEQ ID NO: 157924 - DNA, 15 bp, Homo sapiens
gtgctttctagttgt

SEQ ID NO: 157925 - DNA, 15 bp, Homo sapiens
tgctttctagttgtg

SEQ ID NO: 157926 - DNA, 15 bp, Homo sapiens
gctttctagttgtgc

SEQ ID NO: 157927 - DNA, 15 bp, Homo sapiens
ctttctagttgtgca

SEQ ID NO: 157928 - DNA, 15 bp, Homo sapiens
tttctagttgtgcat

SEQ ID NO: 157929 - DNA, 15 bp, Homo sapiens
ttctagttgtgcatg

SEQ ID NO: 157930 - DNA, 15 bp, Homo sapiens
tctagttgtgcatgc

SEQ ID NO: 157931 - DNA, 15 bp, Homo sapiens
ctagttgtgcatgca

SEQ ID NO: 157932 - DNA, 15 bp, Homo sapiens
tagttgtgcatgcaa

SEQ ID NO: 157933 - DNA, 15 bp, Homo sapiens
agttgtgcatgcaaa

SEQ ID NO: 157934 - DNA, 15 bp, Homo sapiens
gttgtgcatgcaaag

SEQ ID NO: 157935 - DNA, 15 bp, Homo sapiens
ttgtgcatgcaaaga

SEQ ID NO: 157936 - DNA, 15 bp, Homo sapiens
tgtgcatgcaaagag

SEQ ID NO: 157937 - DNA, 15 bp, Homo sapiens
gtgcatgcaaagagt

SEQ ID NO: 157938 - DNA, 15 bp, Homo sapiens
tgcatgcaaagagta

SEQ ID NO: 157939 - DNA, 15 bp, Homo sapiens
gcatgcaaagagtac

SEQ ID NO: 157940 - DNA, 15 bp, Homo sapiens
catgcaaagagtaca

SEQ ID NO: 157941 - DNA, 15 bp, Homo sapiens
atgcaaagagtacaa

SEQ ID NO: 157942 - DNA, 15 bp, Homo sapiens
tgcaaagagtacaaa

SEQ ID NO: 157943 - DNA, 15 bp, Homo sapiens
gcaaagagtacaaag

SEQ ID NO: 157944 - DNA, 15 bp, Homo sapiens
caaagagtacaaagt

SEQ ID NO: 157945 - DNA, 15 bp, Homo sapiens
aaagagtacaaagtt

SEQ ID NO: 157946 - DNA, 15 bp, Homo sapiens
aagagtacaaagttt

SEQ ID NO: 157947 - DNA, 15 bp, Homo sapiens
agagtacaaagtttt

SEQ ID NO: 157948 - DNA, 15 bp, Homo sapiens
gagtacaaagttttc

SEQ ID NO: 157949 - DNA, 15 bp, Homo sapiens
agtacaaagttttct

SEQ ID NO: 157950 - DNA, 15 bp, Homo sapiens
gtacaaagttttctt

SEQ ID NO: 157951 - DNA, 15 bp, Homo sapiens
tacaaagttttcttg

SEQ ID NO: 157952 - DNA, 15 bp, Homo sapiens
acaaagttttcttgc

SEQ ID NO: 157953 - DNA, 15 bp, Homo sapiens
caaagttttcttgcc

SEQ ID NO: 157954 - DNA, 15 bp, Homo sapiens
aaagttttcttgccc

SEQ ID NO: 157955 - DNA, 15 bp, Homo sapiens
aagttttcttgccct

SEQ ID NO: 157956 - DNA, 15 bp, Homo sapiens
agttttcttgccctt

SEQ ID NO: 157957 - DNA, 15 bp, Homo sapiens
gttttcttgcccttt

SEQ ID NO: 157958 - DNA, 15 bp, Homo sapiens
ttttcttgccctttc

SEQ ID NO: 157959 - DNA, 15 bp, Homo sapiens
tttcttgccctttct

SEQ ID NO: 157960 - DNA, 15 bp, Homo sapiens
ttcttgccctttctt

SEQ ID NO: 157961 - DNA, 15 bp, Homo sapiens
tcttgccctttcttg

SEQ ID NO: 157962 - DNA, 15 bp, Homo sapiens
cttgccctttcttgg

SEQ ID NO: 157963 - DNA, 15 bp, Homo sapiens
ttgccctttcttgga

SEQ ID NO: 157964 - DNA, 15 bp, Homo sapiens
tgccctttcttggaa

SEQ ID NO: 157965 - DNA, 15 bp, Homo sapiens
gccctttcttggaaa

SEQ ID NO: 157966 - DNA, 15 bp, Homo sapiens
ccctttcttggaaaa

SEQ ID NO: 157967 - DNA, 15 bp, Homo sapiens
cctttcttggaaaat

SEQ ID NO: 157968 - DNA, 15 bp, Homo sapiens
ctttcttggaaaatc

SEQ ID NO: 157969 - DNA, 15 bp, Homo sapiens
tttcttggaaaatcc

SEQ ID NO: 157970 - DNA, 15 bp, Homo sapiens
ttcttggaaaatcct

SEQ ID NO: 157971 - DNA, 15 bp, Homo sapiens
tcttggaaaatcctg

SEQ ID NO: 157972 - DNA, 15 bp, Homo sapiens
cttggaaaatcctgc

SEQ ID NO: 157973 - DNA, 15 bp, Homo sapiens
ttggaaaatcctgct

SEQ ID NO: 157974 - DNA, 15 bp, Homo sapiens
tggaaaatcctgctt

SEQ ID NO: 157975 - DNA, 15 bp, Homo sapiens
ggaaaatcctgcttg

SEQ ID NO: 157976 - DNA, 15 bp, Homo sapiens
gaaaatcctgcttgt

SEQ ID NO: 157977 - DNA, 15 bp, Homo sapiens
aaaatcctgcttgtc

SEQ ID NO: 157978 - DNA, 15 bp, Homo sapiens
aaatcctgcttgtct

SEQ ID NO: 157979 - DNA, 15 bp, Homo sapiens
aatcctgcttgtctg

SEQ ID NO: 157980 - DNA, 15 bp, Homo sapiens
atcctgcttgtctgt

SEQ ID NO: 157981 - DNA, 15 bp, Homo sapiens
tcctgcttgtctgtg

SEQ ID NO: 157982 - DNA, 15 bp, Homo sapiens
cctgcttgtctgtgc

SEQ ID NO: 157983 - DNA, 15 bp, Homo sapiens
ctgcttgtctgtgcc

SEQ ID NO: 157984 - DNA, 15 bp, Homo sapiens
tgcttgtctgtgcca

SEQ ID NO: 157985 - DNA, 15 bp, Homo sapiens
gcttgtctgtgccaa

SEQ ID NO: 157986 - DNA, 15 bp, Homo sapiens
cttgtctgtgccaaa

SEQ ID NO: 157987 - DNA, 15 bp, Homo sapiens
ttgtctgtgccaaag

SEQ ID NO: 157988 - DNA, 15 bp, Homo sapiens
tgtctgtgccaaagg

SEQ ID NO: 157989 - DNA, 15 bp, Homo sapiens
gtctgtgccaaaggg

SEQ ID NO: 157990 - DNA, 15 bp, Homo sapiens
tctgtgccaaaggga

SEQ ID NO: 157991 - DNA, 15 bp, Homo sapiens
ctgtgccaaagggat

SEQ ID NO: 157992 - DNA, 15 bp, Homo sapiens
tgtgccaaagggata

SEQ ID NO: 157993 - DNA, 15 bp, Homo sapiens
gtgccaaagggataa

SEQ ID NO: 157994 - DNA, 15 bp, Homo sapiens
tgccaaagggataat

SEQ ID NO: 157995 - DNA, 15 bp, Homo sapiens
gccaaagggataatt

SEQ ID NO: 157996 - DNA, 15 bp, Homo sapiens
ccaaagggataattg

SEQ ID NO: 157997 - DNA, 15 bp, Homo sapiens
caaagggataattgt

SEQ ID NO: 157998 - DNA, 15 bp, Homo sapiens
aaagggataattgtg

SEQ ID NO: 157999 - DNA, 15 bp, Homo sapiens
aagggataattgtga

SEQ ID NO: 158000 - DNA, 15 bp, Homo sapiens
agggataattgtgaa

SEQ ID NO: 158001 - DNA, 15 bp, Homo sapiens
gggataattgtgaaa

SEQ ID NO: 158002 - DNA, 15 bp, Homo sapiens
ggataattgtgaaag

SEQ ID NO: 158003 - DNA, 15 bp, Homo sapiens
gataattgtgaaagc

SEQ ID NO: 158004 - DNA, 15 bp, Homo sapiens
ataattgtgaaagca

SEQ ID NO: 158005 - DNA, 15 bp, Homo sapiens
taattgtgaaagcac

SEQ ID NO: 158006 - DNA, 15 bp, Homo sapiens
aattgtgaaagcact

SEQ ID NO: 158007 - DNA, 15 bp, Homo sapiens
attgtgaaagcactt

SEQ ID NO: 158008 - DNA, 15 bp, Homo sapiens
ttgtgaaagcacttt

SEQ ID NO: 158009 - DNA, 15 bp, Homo sapiens
tgtgaaagcactttt

SEQ ID NO: 158010 - DNA, 15 bp, Homo sapiens
gtgaaagcacttttg

SEQ ID NO: 158011 - DNA, 15 bp, Homo sapiens
tgaaagcacttttga

SEQ ID NO: 158012 - DNA, 15 bp, Homo sapiens
gaaagcacttttgaa

SEQ ID NO: 158013 - DNA, 15 bp, Homo sapiens
aaagcacttttgaaa

SEQ ID NO: 158014 - DNA, 15 bp, Homo sapiens
aagcacttttgaaat

SEQ ID NO: 158015 - DNA, 15 bp, Homo sapiens
agcacttttgaaata

SEQ ID NO: 158016 - DNA, 15 bp, Homo sapiens
gcacttttgaaatac

SEQ ID NO: 158017 - DNA, 15 bp, Homo sapiens
cacttttgaaatact

SEQ ID NO: 158018 - DNA, 15 bp, Homo sapiens
acttttgaaatactt

SEQ ID NO: 158019 - DNA, 15 bp, Homo sapiens
cttttgaaatactta

SEQ ID NO: 158020 - DNA, 15 bp, Homo sapiens
ttttgaaatacttaa

SEQ ID NO: 158021 - DNA, 15 bp, Homo sapiens
tttgaaatacttaat

SEQ ID NO: 158022 - DNA, 15 bp, Homo sapiens
ttgaaatacttaatg

SEQ ID NO: 158023 - DNA, 15 bp, Homo sapiens
tgaaatacttaatga

SEQ ID NO: 158024 - DNA, 15 bp, Homo sapiens
gaaatacttaatgag

SEQ ID NO: 158025 - DNA, 15 bp, Homo sapiens
aaatacttaatgagt

SEQ ID NO: 158026 - DNA, 15 bp, Homo sapiens
aatacttaatgagtt

SEQ ID NO: 158027 - DNA, 15 bp, Homo sapiens
atacttaatgagttg

SEQ ID NO: 158028 - DNA, 15 bp, Homo sapiens
tacttaatgagttga

SEQ ID NO: 158029 - DNA, 15 bp, Homo sapiens
acttaatgagttgat

SEQ ID NO: 158030 - DNA, 15 bp, Homo sapiens
cttaatgagttgatt

SEQ ID NO: 158031 - DNA, 15 bp, Homo sapiens
ttaatgagttgattt

SEQ ID NO: 158032 - DNA, 15 bp, Homo sapiens
taatgagttgatttt

SEQ ID NO: 158033 - DNA, 15 bp, Homo sapiens
aatgagttgattttc

SEQ ID NO: 158034 - DNA, 15 bp, Homo sapiens
atgagttgattttct

SEQ ID NO: 158035 - DNA, 15 bp, Homo sapiens
tgagttgattttctt

SEQ ID NO: 158036 - DNA, 15 bp, Homo sapiens
gagttgattttcttc

SEQ ID NO: 158037 - DNA, 15 bp, Homo sapiens
agttgattttcttca

SEQ ID NO: 158038 - DNA, 15 bp, Homo sapiens
gttgattttcttcaa

SEQ ID NO: 158039 - DNA, 15 bp, Homo sapiens
ttgattttcttcaaa

SEQ ID NO: 158040 - DNA, 15 bp, Homo sapiens
tgattttcttcaaat

SEQ ID NO: 158041 - DNA, 15 bp, Homo sapiens
gattttcttcaaatt

SEQ ID NO: 158042 - DNA, 15 bp, Homo sapiens
attttcttcaaatta

SEQ ID NO: 158043 - DNA, 15 bp, Homo sapiens
ttttcttcaaattaa

SEQ ID NO: 158044 - DNA, 15 bp, Homo sapiens
tttcttcaaattaaa

SEQ ID NO: 158045 - DNA, 15 bp, Homo sapiens
ttcttcaaattaaaa

SEQ ID NO: 158046 - DNA, 15 bp, Homo sapiens
tcttcaaattaaaaa

SEQ ID NO: 158047 - DNA, 15 bp, Homo sapiens
cttcaaattaaaaaa

SEQ ID NO: 158048 - DNA, 15 bp, Homo sapiens
ttcaaattaaaaaaa

SEQ ID NO: 158049 - DNA, 15 bp, Homo sapiens
tcaaattaaaaaaaa

SEQ ID NO: 158050 - DNA, 15 bp, Homo sapiens
caaattaaaaaaaat

SEQ ID NO: 158051 - DNA, 15 bp, Homo sapiens
aaattaaaaaaaata

SEQ ID NO: 158052 - DNA, 15 bp, Homo sapiens
aattaaaaaaaatat

SEQ ID NO: 158053 - DNA, 15 bp, Homo sapiens
attaaaaaaaatata

SEQ ID NO: 158054 - DNA, 15 bp, Homo sapiens
ttaaaaaaaatatat

SEQ ID NO: 158055 - DNA, 15 bp, Homo sapiens
taaaaaaaatatata

SEQ ID NO: 158056 - DNA, 15 bp, Homo sapiens
aaaaaaaatatataa

SEQ ID NO: 158057 - DNA, 15 bp, Homo sapiens
aaaaaaatatataaa

SEQ ID NO: 158058 - DNA, 15 bp, Homo sapiens
aaaaaatatataaat

SEQ ID NO: 158059 - DNA, 15 bp, Homo sapiens
aaaaatatataaatg

SEQ ID NO: 158060 - DNA, 15 bp, Homo sapiens
aaaatatataaatgt

SEQ ID NO: 158061 - DNA, 15 bp, Homo sapiens
aaatatataaatgta

SEQ ID NO: 158062 - DNA, 15 bp, Homo sapiens
aatatataaatgtat

SEQ ID NO: 158063 - DNA, 15 bp, Homo sapiens
atatataaatgtata

SEQ ID NO: 158064 - DNA, 15 bp, Homo sapiens
tatataaatgtatat

SEQ ID NO: 158065 - DNA, 15 bp, Homo sapiens
atataaatgtatatg

SEQ ID NO: 158066 - DNA, 15 bp, Homo sapiens
tataaatgtatatgt

SEQ ID NO: 158067 - DNA, 15 bp, Homo sapiens
ataaatgtatatgtg

SEQ ID NO: 158068 - DNA, 15 bp, Homo sapiens
taaatgtatatgtgt

SEQ ID NO: 158069 - DNA, 15 bp, Homo sapiens
aaatgtatatgtgta

SEQ ID NO: 158070 - DNA, 15 bp, Homo sapiens
aatgtatatgtgtat

SEQ ID NO: 158071 - DNA, 15 bp, Homo sapiens
atgtatatgtgtatg

SEQ ID NO: 158072 - DNA, 15 bp, Homo sapiens
tgtatatgtgtatgt

SEQ ID NO: 158073 - DNA, 15 bp, Homo sapiens
gtatatgtgtatgta

SEQ ID NO: 158074 - DNA, 15 bp, Homo sapiens
tatatgtgtatgtac

SEQ ID NO: 158075 - DNA, 15 bp, Homo sapiens
atatgtgtatgtaca

SEQ ID NO: 158076 - DNA, 15 bp, Homo sapiens
tatgtgtatgtacat

SEQ ID NO: 158077 - DNA, 15 bp, Homo sapiens
atgtgtatgtacatg

SEQ ID NO: 158078 - DNA, 15 bp, Homo sapiens
tgtgtatgtacatgt

SEQ ID NO: 158079 - DNA, 15 bp, Homo sapiens
gtgtatgtacatgtg

SEQ ID NO: 158080 - DNA, 15 bp, Homo sapiens
tgtatgtacatgtgt

SEQ ID NO: 158081 - DNA, 15 bp, Homo sapiens
gtatgtacatgtgtg

SEQ ID NO: 158082 - DNA, 15 bp, Homo sapiens
tatgtacatgtgtgt

SEQ ID NO: 158083 - DNA, 15 bp, Homo sapiens
atgtacatgtgtgta

SEQ ID NO: 158084 - DNA, 15 bp, Homo sapiens
tgtacatgtgtgtac

SEQ ID NO: 158085 - DNA, 15 bp, Homo sapiens
gtacatgtgtgtaca

SEQ ID NO: 158086 - DNA, 15 bp, Homo sapiens
tacatgtgtgtacac

SEQ ID NO: 158087 - DNA, 15 bp, Homo sapiens
acatgtgtgtacaca

SEQ ID NO: 158088 - DNA, 15 bp, Homo sapiens
catgtgtgtacacat

SEQ ID NO: 158089 - DNA, 15 bp, Homo sapiens
atgtgtgtacacata

SEQ ID NO: 158090 - DNA, 15 bp, Homo sapiens
tgtgtgtacacatac

SEQ ID NO: 158091 - DNA, 15 bp, Homo sapiens
gtgtgtacacataca

SEQ ID NO: 158092 - DNA, 15 bp, Homo sapiens
tgtgtacacatacac

SEQ ID NO: 158093 - DNA, 15 bp, Homo sapiens
gtgtacacatacaca

SEQ ID NO: 158094 - DNA, 15 bp, Homo sapiens
tgtacacatacacac

SEQ ID NO: 158095 - DNA, 15 bp, Homo sapiens
gtacacatacacacc

SEQ ID NO: 158096 - DNA, 15 bp, Homo sapiens
tacacatacacacct

SEQ ID NO: 158097 - DNA, 15 bp, Homo sapiens
acacatacacacctt

SEQ ID NO: 158098 - DNA, 15 bp, Homo sapiens
cacatacacaccttt

SEQ ID NO: 158099 - DNA, 15 bp, Homo sapiens
acatacacaccttta

SEQ ID NO: 158100 - DNA, 15 bp, Homo sapiens
catacacacctttat

SEQ ID NO: 158101 - DNA, 15 bp, Homo sapiens
atacacacctttata

SEQ ID NO: 158102 - DNA, 15 bp, Homo sapiens
tacacacctttatac

SEQ ID NO: 158103 - DNA, 15 bp, Homo sapiens
acacacctttataca

SEQ ID NO: 158104 - DNA, 15 bp, Homo sapiens
cacacctttatacat

SEQ ID NO: 158105 - DNA, 15 bp, Homo sapiens
acacctttatacata

SEQ ID NO: 158106 - DNA, 15 bp, Homo sapiens
cacctttatacatac

SEQ ID NO: 158107 - DNA, 15 bp, Homo sapiens
acctttatacataca

SEQ ID NO: 158108 - DNA, 15 bp, Homo sapiens
cctttatacatacag

SEQ ID NO: 158109 - DNA, 15 bp, Homo sapiens
ctttatacatacagc

SEQ ID NO: 158110 - DNA, 15 bp, Homo sapiens
tttatacatacagcc

SEQ ID NO: 158111 - DNA, 15 bp, Homo sapiens
ttatacatacagccc

SEQ ID NO: 158112 - DNA, 15 bp, Homo sapiens
tatacatacagccca

SEQ ID NO: 158113 - DNA, 15 bp, Homo sapiens
atacatacagcccat

SEQ ID NO: 158114 - DNA, 15 bp, Homo sapiens
tacatacagcccatt

SEQ ID NO: 158115 - DNA, 15 bp, Homo sapiens
acatacagcccattt

SEQ ID NO: 158116 - DNA, 15 bp, Homo sapiens
catacagcccattta

SEQ ID NO: 158117 - DNA, 15 bp, Homo sapiens
atacagcccatttaa

SEQ ID NO: 158118 - DNA, 15 bp, Homo sapiens
tacagcccatttaaa

SEQ ID NO: 158119 - DNA, 15 bp, Homo sapiens
acagcccatttaaaa

SEQ ID NO: 158120 - DNA, 15 bp, Homo sapiens
cagcccatttaaaac

SEQ ID NO: 158121 - DNA, 15 bp, Homo sapiens
agcccatttaaaaca

SEQ ID NO: 158122 - DNA, 15 bp, Homo sapiens
gcccatttaaaacaa

SEQ ID NO: 158123 - DNA, 15 bp, Homo sapiens
cccatttaaaacaag

SEQ ID NO: 158124 - DNA, 15 bp, Homo sapiens
ccatttaaaacaagc

SEQ ID NO: 158125 - DNA, 15 bp, Homo sapiens
catttaaaacaagct

SEQ ID NO: 158126 - DNA, 15 bp, Homo sapiens
atttaaaacaagctc

SEQ ID NO: 158127 - DNA, 15 bp, Homo sapiens
tttaaaacaagctcc

SEQ ID NO: 158128 - DNA, 15 bp, Homo sapiens
ttaaaacaagctcca

SEQ ID NO: 158129 - DNA, 15 bp, Homo sapiens
taaaacaagctccac

SEQ ID NO: 158130 - DNA, 15 bp, Homo sapiens
aaaacaagctccact

SEQ ID NO: 158131 - DNA, 15 bp, Homo sapiens
aaacaagctccactt

SEQ ID NO: 158132 - DNA, 15 bp, Homo sapiens
aacaagctccacttt

SEQ ID NO: 158133 - DNA, 15 bp, Homo sapiens
acaagctccactttg

SEQ ID NO: 158134 - DNA, 15 bp, Homo sapiens
caagctccactttgg

SEQ ID NO: 158135 - DNA, 15 bp, Homo sapiens
aagctccactttgga

SEQ ID NO: 158136 - DNA, 15 bp, Homo sapiens
agctccactttggag

SEQ ID NO: 158137 - DNA, 15 bp, Homo sapiens
gctccactttggagt

SEQ ID NO: 158138 - DNA, 15 bp, Homo sapiens
ctccactttggagtg

SEQ ID NO: 158139 - DNA, 15 bp, Homo sapiens
tccactttggagtgc

SEQ ID NO: 158140 - DNA, 15 bp, Homo sapiens
ccactttggagtgct

SEQ ID NO: 158141 - DNA, 15 bp, Homo sapiens
cactttggagtgctc

SEQ ID NO: 158142 - DNA, 15 bp, Homo sapiens
actttggagtgctct

SEQ ID NO: 158143 - DNA, 15 bp, Homo sapiens
ctttggagtgctcta

SEQ ID NO: 158144 - DNA, 15 bp, Homo sapiens
tttggagtgctctac

SEQ ID NO: 158145 - DNA, 15 bp, Homo sapiens
ttggagtgctctacg

SEQ ID NO: 158146 - DNA, 15 bp, Homo sapiens
tggagtgctctacgt

SEQ ID NO: 158147 - DNA, 15 bp, Homo sapiens
ggagtgctctacgtc

SEQ ID NO: 158148 - DNA, 15 bp, Homo sapiens
gagtgctctacgtca

SEQ ID NO: 158149 - DNA, 15 bp, Homo sapiens
agtgctctacgtcac

SEQ ID NO: 158150 - DNA, 15 bp, Homo sapiens
gtgctctacgtcacc

SEQ ID NO: 158151 - DNA, 15 bp, Homo sapiens
tgctctacgtcaccc

SEQ ID NO: 158152 - DNA, 15 bp, Homo sapiens
gctctacgtcaccct

SEQ ID NO: 158153 - DNA, 15 bp, Homo sapiens
ctctacgtcaccctg

SEQ ID NO: 158154 - DNA, 15 bp, Homo sapiens
tctacgtcaccctga

SEQ ID NO: 158155 - DNA, 15 bp, Homo sapiens
ctacgtcaccctgat

SEQ ID NO: 158156 - DNA, 15 bp, Homo sapiens
tacgtcaccctgatg

SEQ ID NO: 158157 - DNA, 15 bp, Homo sapiens
acgtcaccctgatgc

SEQ ID NO: 158158 - DNA, 15 bp, Homo sapiens
cgtcaccctgatgcc

SEQ ID NO: 158159 - DNA, 15 bp, Homo sapiens
gtcaccctgatgccg

SEQ ID NO: 158160 - DNA, 15 bp, Homo sapiens
tcaccctgatgccga

SEQ ID NO: 158161 - DNA, 15 bp, Homo sapiens
caccctgatgccgaa

SEQ ID NO: 158162 - DNA, 15 bp, Homo sapiens
accctgatgccgaat

SEQ ID NO: 158163 - DNA, 15 bp, Homo sapiens
ccctgatgccgaata

SEQ ID NO: 158164 - DNA, 15 bp, Homo sapiens
cctgatgccgaatac

SEQ ID NO: 158165 - DNA, 15 bp, Homo sapiens
ctgatgccgaataca

SEQ ID NO: 158166 - DNA, 15 bp, Homo sapiens
tgatgccgaatacag

SEQ ID NO: 158167 - DNA, 15 bp, Homo sapiens
gatgccgaatacagg

SEQ ID NO: 158168 - DNA, 15 bp, Homo sapiens
atgccgaatacaggg

SEQ ID NO: 158169 - DNA, 15 bp, Homo sapiens
tgccgaatacagggc

SEQ ID NO: 158170 - DNA, 15 bp, Homo sapiens
gccgaatacagggcc

SEQ ID NO: 158171 - DNA, 15 bp, Homo sapiens
ccgaatacagggcca

SEQ ID NO: 158172 - DNA, 15 bp, Homo sapiens
cgaatacagggccag

SEQ ID NO: 158173 - DNA, 15 bp, Homo sapiens
gaatacagggccaga

SEQ ID NO: 158174 - DNA, 15 bp, Homo sapiens
aatacagggccagag

SEQ ID NO: 158175 - DNA, 15 bp, Homo sapiens
atacagggccagagt

SEQ ID NO: 158176 - DNA, 15 bp, Homo sapiens
tacagggccagagtc

SEQ ID NO: 158177 - DNA, 15 bp, Homo sapiens
acagggccagagtct

SEQ ID NO: 158178 - DNA, 15 bp, Homo sapiens
cagggccagagtctg

SEQ ID NO: 158179 - DNA, 15 bp, Homo sapiens
agggccagagtctga

SEQ ID NO: 158180 - DNA, 15 bp, Homo sapiens
gggccagagtctgag

SEQ ID NO: 158181 - DNA, 15 bp, Homo sapiens
ggccagagtctgaga

SEQ ID NO: 158182 - DNA, 15 bp, Homo sapiens
gccagagtctgagat

SEQ ID NO: 158183 - DNA, 15 bp, Homo sapiens
ccagagtctgagatc

SEQ ID NO: 158184 - DNA, 15 bp, Homo sapiens
cagagtctgagatcc

SEQ ID NO: 158185 - DNA, 15 bp, Homo sapiens
agagtctgagatcct

SEQ ID NO: 158186 - DNA, 15 bp, Homo sapiens
gagtctgagatcctt

SEQ ID NO: 158187 - DNA, 15 bp, Homo sapiens
agtctgagatccttc

SEQ ID NO: 158188 - DNA, 15 bp, Homo sapiens
gtctgagatccttct

SEQ ID NO: 158189 - DNA, 15 bp, Homo sapiens
tctgagatccttctg

SEQ ID NO: 158190 - DNA, 15 bp, Homo sapiens
ctgagatccttctgg

SEQ ID NO: 158191 - DNA, 15 bp, Homo sapiens
tgagatccttctggg

SEQ ID NO: 158192 - DNA, 15 bp, Homo sapiens
gagatccttctgggt

SEQ ID NO: 158193 - DNA, 15 bp, Homo sapiens
agatccttctgggtg

SEQ ID NO: 158194 - DNA, 15 bp, Homo sapiens
gatccttctgggtgg

SEQ ID NO: 158195 - DNA, 15 bp, Homo sapiens
atccttctgggtggt

SEQ ID NO: 158196 - DNA, 15 bp, Homo sapiens
tccttctgggtggtt

SEQ ID NO: 158197 - DNA, 15 bp, Homo sapiens
ccttctgggtggttt

SEQ ID NO: 158198 - DNA, 15 bp, Homo sapiens
cttctgggtggtttc

SEQ ID NO: 158199 - DNA, 15 bp, Homo sapiens
ttctgggtggtttct

SEQ ID NO: 158200 - DNA, 15 bp, Homo sapiens
tctgggtggtttctg

SEQ ID NO: 158201 - DNA, 15 bp, Homo sapiens
ctgggtggtttctgt

SEQ ID NO: 158202 - DNA, 15 bp, Homo sapiens
tgggtggtttctgtg

SEQ ID NO: 158203 - DNA, 15 bp, Homo sapiens
gggtggtttctgtgt

SEQ ID NO: 158204 - DNA, 15 bp, Homo sapiens
ggtggtttctgtgtt

SEQ ID NO: 158205 - DNA, 15 bp, Homo sapiens
gtggtttctgtgttt

SEQ ID NO: 158206 - DNA, 15 bp, Homo sapiens
tggtttctgtgtttt

SEQ ID NO: 158207 - DNA, 15 bp, Homo sapiens
ggtttctgtgttttg

SEQ ID NO: 158208 - DNA, 15 bp, Homo sapiens
gtttctgtgttttgt

SEQ ID NO: 158209 - DNA, 15 bp, Homo sapiens
tttctgtgttttgtt

SEQ ID NO: 158210 - DNA, 15 bp, Homo sapiens
ttctgtgttttgttc

SEQ ID NO: 158211 - DNA, 15 bp, Homo sapiens
tctgtgttttgttca

SEQ ID NO: 158212 - DNA, 15 bp, Homo sapiens
ctgtgttttgttcat

SEQ ID NO: 158213 - DNA, 15 bp, Homo sapiens
tgtgttttgttcatt

SEQ ID NO: 158214 - DNA, 15 bp, Homo sapiens
gtgttttgttcattt

SEQ ID NO: 158215 - DNA, 15 bp, Homo sapiens
tgttttgttcatttc

SEQ ID NO: 158216 - DNA, 15 bp, Homo sapiens
gttttgttcatttct

SEQ ID NO: 158217 - DNA, 15 bp, Homo sapiens
ttttgttcatttctg

SEQ ID NO: 158218 - DNA, 15 bp, Homo sapiens
tttgttcatttctgt

SEQ ID NO: 158219 - DNA, 15 bp, Homo sapiens
ttgttcatttctgtt

SEQ ID NO: 158220 - DNA, 15 bp, Homo sapiens
tgttcatttctgttt

SEQ ID NO: 158221 - DNA, 15 bp, Homo sapiens
gttcatttctgtttt

SEQ ID NO: 158222 - DNA, 15 bp, Homo sapiens
ttcatttctgtttta

SEQ ID NO: 158223 - DNA, 15 bp, Homo sapiens
tcatttctgttttaa

SEQ ID NO: 158224 - DNA, 15 bp, Homo sapiens
catttctgttttaag

SEQ ID NO: 158225 - DNA, 15 bp, Homo sapiens
atttctgttttaaga

SEQ ID NO: 158226 - DNA, 15 bp, Homo sapiens
tttctgttttaagag

SEQ ID NO: 158227 - DNA, 15 bp, Homo sapiens
ttctgttttaagagc

SEQ ID NO: 158228 - DNA, 15 bp, Homo sapiens
tctgttttaagagcc

SEQ ID NO: 158229 - DNA, 15 bp, Homo sapiens
ctgttttaagagcct

SEQ ID NO: 158230 - DNA, 15 bp, Homo sapiens
tgttttaagagcctg

SEQ ID NO: 158231 - DNA, 15 bp, Homo sapiens
gttttaagagcctgt

SEQ ID NO: 158232 - DNA, 15 bp, Homo sapiens
ttttaagagcctgtc

SEQ ID NO: 158233 - DNA, 15 bp, Homo sapiens
tttaagagcctgtca

SEQ ID NO: 158234 - DNA, 15 bp, Homo sapiens
ttaagagcctgtcac

SEQ ID NO: 158235 - DNA, 15 bp, Homo sapiens
taagagcctgtcaca

SEQ ID NO: 158236 - DNA, 15 bp, Homo sapiens
aagagcctgtcacag

SEQ ID NO: 158237 - DNA, 15 bp, Homo sapiens
agagcctgtcacaga

SEQ ID NO: 158238 - DNA, 15 bp, Homo sapiens
gagcctgtcacagag

SEQ ID NO: 158239 - DNA, 15 bp, Homo sapiens
agcctgtcacagaga

SEQ ID NO: 158240 - DNA, 15 bp, Homo sapiens
gcctgtcacagagaa

SEQ ID NO: 158241 - DNA, 15 bp, Homo sapiens
cctgtcacagagaaa

SEQ ID NO: 158242 - DNA, 15 bp, Homo sapiens
ctgtcacagagaaat

SEQ ID NO: 158243 - DNA, 15 bp, Homo sapiens
tgtcacagagaaatg

SEQ ID NO: 158244 - DNA, 15 bp, Homo sapiens
gtcacagagaaatgc

SEQ ID NO: 158245 - DNA, 15 bp, Homo sapiens
tcacagagaaatgct

SEQ ID NO: 158246 - DNA, 15 bp, Homo sapiens
cacagagaaatgctt

SEQ ID NO: 158247 - DNA, 15 bp, Homo sapiens
acagagaaatgcttc

SEQ ID NO: 158248 - DNA, 15 bp, Homo sapiens
cagagaaatgcttcc

SEQ ID NO: 158249 - DNA, 15 bp, Homo sapiens
agagaaatgcttcct

SEQ ID NO: 158250 - DNA, 15 bp, Homo sapiens
gagaaatgcttccta

SEQ ID NO: 158251 - DNA, 15 bp, Homo sapiens
agaaatgcttcctaa

SEQ ID NO: 158252 - DNA, 15 bp, Homo sapiens
gaaatgcttcctaaa

SEQ ID NO: 158253 - DNA, 15 bp, Homo sapiens
aaatgcttcctaaaa

SEQ ID NO: 158254 - DNA, 15 bp, Homo sapiens
aatgcttcctaaaat

SEQ ID NO: 158255 - DNA, 15 bp, Homo sapiens
atgcttcctaaaatg

SEQ ID NO: 158256 - DNA, 15 bp, Homo sapiens
tgcttcctaaaatgt

SEQ ID NO: 158257 - DNA, 15 bp, Homo sapiens
gcttcctaaaatgtt

SEQ ID NO: 158258 - DNA, 15 bp, Homo sapiens
cttcctaaaatgttt

SEQ ID NO: 158259 - DNA, 15 bp, Homo sapiens
ttcctaaaatgttta

SEQ ID NO: 158260 - DNA, 15 bp, Homo sapiens
tcctaaaatgtttaa

SEQ ID NO: 158261 - DNA, 15 bp, Homo sapiens
cctaaaatgtttaat

SEQ ID NO: 158262 - DNA, 15 bp, Homo sapiens
ctaaaatgtttaatt

SEQ ID NO: 158263 - DNA, 15 bp, Homo sapiens
taaaatgtttaattt

SEQ ID NO: 158264 - DNA, 15 bp, Homo sapiens
aaaatgtttaattta

SEQ ID NO: 158265 - DNA, 15 bp, Homo sapiens
aaatgtttaatttat

SEQ ID NO: 158266 - DNA, 15 bp, Homo sapiens
aatgtttaatttata

SEQ ID NO: 158267 - DNA, 15 bp, Homo sapiens
atgtttaatttataa

SEQ ID NO: 158268 - DNA, 15 bp, Homo sapiens
tgtttaatttataaa

SEQ ID NO: 158269 - DNA, 15 bp, Homo sapiens
gtttaatttataaaa

SEQ ID NO: 158270 - DNA, 15 bp, Homo sapiens
tttaatttataaaaa

SEQ ID NO: 158271 - DNA, 15 bp, Homo sapiens
ttaatttataaaaac

SEQ ID NO: 158272 - DNA, 15 bp, Homo sapiens
taatttataaaaaca

SEQ ID NO: 158273 - DNA, 15 bp, Homo sapiens
aatttataaaaacat

SEQ ID NO: 158274 - DNA, 15 bp, Homo sapiens
atttataaaaacatt

SEQ ID NO: 158275 - DNA, 15 bp, Homo sapiens
tttataaaaacattt

SEQ ID NO: 158276 - DNA, 15 bp, Homo sapiens
ttataaaaacatttt

SEQ ID NO: 158277 - DNA, 15 bp, Homo sapiens
tataaaaacattttt

SEQ ID NO: 158278 - DNA, 15 bp, Homo sapiens
ataaaaacattttta

SEQ ID NO: 158279 - DNA, 15 bp, Homo sapiens
taaaaacatttttat

SEQ ID NO: 158280 - DNA, 15 bp, Homo sapiens
aaaaacatttttatc

SEQ ID NO: 158281 - DNA, 15 bp, Homo sapiens
aaaacatttttatct

SEQ ID NO: 158282 - DNA, 15 bp, Homo sapiens
aaacatttttatctc

SEQ ID NO: 158283 - DNA, 15 bp, Homo sapiens
aacatttttatctct

SEQ ID NO: 158284 - DNA, 15 bp, Homo sapiens
acatttttatctctc

SEQ ID NO: 158285 - DNA, 15 bp, Homo sapiens
catttttatctctcg

SEQ ID NO: 158286 - DNA, 15 bp, Homo sapiens
atttttatctctcga

SEQ ID NO: 158287 - DNA, 15 bp, Homo sapiens
tttttatctctcgat

SEQ ID NO: 158288 - DNA, 15 bp, Homo sapiens
ttttatctctcgatt

SEQ ID NO: 158289 - DNA, 15 bp, Homo sapiens
tttatctctcgatta

SEQ ID NO: 158290 - DNA, 15 bp, Homo sapiens
ttatctctcgattac

SEQ ID NO: 158291 - DNA, 15 bp, Homo sapiens
tatctctcgattact

SEQ ID NO: 158292 - DNA, 15 bp, Homo sapiens
atctctcgattactg

SEQ ID NO: 158293 - DNA, 15 bp, Homo sapiens
tctctcgattactgg

SEQ ID NO: 158294 - DNA, 15 bp, Homo sapiens
ctctcgattactggt

SEQ ID NO: 158295 - DNA, 15 bp, Homo sapiens
tctcgattactggtt

SEQ ID NO: 158296 - DNA, 15 bp, Homo sapiens
ctcgattactggttt

SEQ ID NO: 158297 - DNA, 15 bp, Homo sapiens
tcgattactggtttt

SEQ ID NO: 158298 - DNA, 15 bp, Homo sapiens
cgattactggtttta

SEQ ID NO: 158299 - DNA, 15 bp, Homo sapiens
gattactggttttaa

SEQ ID NO: 158300 - DNA, 15 bp, Homo sapiens
attactggttttaat

SEQ ID NO: 158301 - DNA, 15 bp, Homo sapiens
ttactggttttaatg

SEQ ID NO: 158302 - DNA, 15 bp, Homo sapiens
tactggttttaatga

SEQ ID NO: 158303 - DNA, 15 bp, Homo sapiens
actggttttaatgaa

SEQ ID NO: 158304 - DNA, 15 bp, Homo sapiens
ctggttttaatgaat

SEQ ID NO: 158305 - DNA, 15 bp, Homo sapiens
tggttttaatgaatt

SEQ ID NO: 158306 - DNA, 15 bp, Homo sapiens
ggttttaatgaatta

SEQ ID NO: 158307 - DNA, 15 bp, Homo sapiens
gttttaatgaattac

SEQ ID NO: 158308 - DNA, 15 bp, Homo sapiens
ttttaatgaattact

SEQ ID NO: 158309 - DNA, 15 bp, Homo sapiens
tttaatgaattacta

SEQ ID NO: 158310 - DNA, 15 bp, Homo sapiens
ttaatgaattactaa

SEQ ID NO: 158311 - DNA, 15 bp, Homo sapiens
taatgaattactaag

SEQ ID NO: 158312 - DNA, 15 bp, Homo sapiens
aatgaattactaagc

SEQ ID NO: 158313 - DNA, 15 bp, Homo sapiens
atgaattactaagct

SEQ ID NO: 158314 - DNA, 15 bp, Homo sapiens
tgaattactaagctg

SEQ ID NO: 158315 - DNA, 15 bp, Homo sapiens
gaattactaagctgg

SEQ ID NO: 158316 - DNA, 15 bp, Homo sapiens
aattactaagctggc

SEQ ID NO: 158317 - DNA, 15 bp, Homo sapiens
attactaagctggct

SEQ ID NO: 158318 - DNA, 15 bp, Homo sapiens
ttactaagctggctg

SEQ ID NO: 158319 - DNA, 15 bp, Homo sapiens
tactaagctggctgc

SEQ ID NO: 158320 - DNA, 15 bp, Homo sapiens
actaagctggctgcc

SEQ ID NO: 158321 - DNA, 15 bp, Homo sapiens
ctaagctggctgcct

SEQ ID NO: 158322 - DNA, 15 bp, Homo sapiens
taagctggctgcctc

SEQ ID NO: 158323 - DNA, 15 bp, Homo sapiens
aagctggctgcctct

SEQ ID NO: 158324 - DNA, 15 bp, Homo sapiens
agctggctgcctctc

SEQ ID NO: 158325 - DNA, 15 bp, Homo sapiens
gctggctgcctctca

SEQ ID NO: 158326 - DNA, 15 bp, Homo sapiens
ctggctgcctctcat

SEQ ID NO: 158327 - DNA, 15 bp, Homo sapiens
tggctgcctctcatg

SEQ ID NO: 158328 - DNA, 15 bp, Homo sapiens
ggctgcctctcatgt

SEQ ID NO: 158329 - DNA, 15 bp, Homo sapiens
gctgcctctcatgta

SEQ ID NO: 158330 - DNA, 15 bp, Homo sapiens
ctgcctctcatgtac

SEQ ID NO: 158331 - DNA, 15 bp, Homo sapiens
tgcctctcatgtacc

SEQ ID NO: 158332 - DNA, 15 bp, Homo sapiens
gcctctcatgtaccc

SEQ ID NO: 158333 - DNA, 15 bp, Homo sapiens
cctctcatgtaccca

SEQ ID NO: 158334 - DNA, 15 bp, Homo sapiens
ctctcatgtacccac

SEQ ID NO: 158335 - DNA, 15 bp, Homo sapiens
tctcatgtacccaca

SEQ ID NO: 158336 - DNA, 15 bp, Homo sapiens
ctcatgtacccacag

SEQ ID NO: 158337 - DNA, 15 bp, Homo sapiens
tcatgtacccacagc

SEQ ID NO: 158338 - DNA, 15 bp, Homo sapiens
catgtacccacagca

SEQ ID NO: 158339 - DNA, 15 bp, Homo sapiens
atgtacccacagcaa

SEQ ID NO: 158340 - DNA, 15 bp, Homo sapiens
tgtacccacagcaat

SEQ ID NO: 158341 - DNA, 15 bp, Homo sapiens
gtacccacagcaatg

SEQ ID NO: 158342 - DNA, 15 bp, Homo sapiens
tacccacagcaatga

SEQ ID NO: 158343 - DNA, 15 bp, Homo sapiens
acccacagcaatgat

SEQ ID NO: 158344 - DNA, 15 bp, Homo sapiens
cccacagcaatgatg

SEQ ID NO: 158345 - DNA, 15 bp, Homo sapiens
ccacagcaatgatgc

SEQ ID NO: 158346 - DNA, 15 bp, Homo sapiens
cacagcaatgatgct

SEQ ID NO: 158347 - DNA, 15 bp, Homo sapiens
acagcaatgatgctc

SEQ ID NO: 158348 - DNA, 15 bp, Homo sapiens
cagcaatgatgctcc

SEQ ID NO: 158349 - DNA, 15 bp, Homo sapiens
agcaatgatgctcct

SEQ ID NO: 158350 - DNA, 15 bp, Homo sapiens
gcaatgatgctcctg

SEQ ID NO: 158351 - DNA, 15 bp, Homo sapiens
caatgatgctcctga

SEQ ID NO: 158352 - DNA, 15 bp, Homo sapiens
aatgatgctcctgag

SEQ ID NO: 158353 - DNA, 15 bp, Homo sapiens
atgatgctcctgagg

SEQ ID NO: 158354 - DNA, 15 bp, Homo sapiens
tgatgctcctgagga

SEQ ID NO: 158355 - DNA, 15 bp, Homo sapiens
gatgctcctgaggac

SEQ ID NO: 158356 - DNA, 15 bp, Homo sapiens
atgctcctgaggaca

SEQ ID NO: 158357 - DNA, 15 bp, Homo sapiens
tgctcctgaggacac

SEQ ID NO: 158358 - DNA, 15 bp, Homo sapiens
gctcctgaggacacg

SEQ ID NO: 158359 - DNA, 15 bp, Homo sapiens
ctcctgaggacacgg

SEQ ID NO: 158360 - DNA, 15 bp, Homo sapiens
tcctgaggacacggg

SEQ ID NO: 158361 - DNA, 15 bp, Homo sapiens
cctgaggacacggga

SEQ ID NO: 158362 - DNA, 15 bp, Homo sapiens
ctgaggacacgggaa

SEQ ID NO: 158363 - DNA, 15 bp, Homo sapiens
tgaggacacgggaac

SEQ ID NO: 158364 - DNA, 15 bp, Homo sapiens
gaggacacgggaacc

SEQ ID NO: 158365 - DNA, 15 bp, Homo sapiens
aggacacgggaaccc

SEQ ID NO: 158366 - DNA, 15 bp, Homo sapiens
ggacacgggaaccct

SEQ ID NO: 158367 - DNA, 15 bp, Homo sapiens
gacacgggaaccctg

SEQ ID NO: 158368 - DNA, 15 bp, Homo sapiens
acacgggaaccctgg

SEQ ID NO: 158369 - DNA, 15 bp, Homo sapiens
cacgggaaccctgga

SEQ ID NO: 158370 - DNA, 15 bp, Homo sapiens
acgggaaccctggaa

SEQ ID NO: 158371 - DNA, 15 bp, Homo sapiens
cgggaaccctggaac

SEQ ID NO: 158372 - DNA, 15 bp, Homo sapiens
gggaaccctggaact

SEQ ID NO: 158373 - DNA, 15 bp, Homo sapiens
ggaaccctggaactc

SEQ ID NO: 158374 - DNA, 15 bp, Homo sapiens
gaaccctggaactct

SEQ ID NO: 158375 - DNA, 15 bp, Homo sapiens
aaccctggaactctt

SEQ ID NO: 158376 - DNA, 15 bp, Homo sapiens
accctggaactctta

SEQ ID NO: 158377 - DNA, 15 bp, Homo sapiens
ccctggaactcttaa

SEQ ID NO: 158378 - DNA, 15 bp, Homo sapiens
cctggaactcttaaa

SEQ ID NO: 158379 - DNA, 15 bp, Homo sapiens
ctggaactcttaaac

SEQ ID NO: 158380 - DNA, 15 bp, Homo sapiens
tggaactcttaaacg

SEQ ID NO: 158381 - DNA, 15 bp, Homo sapiens
ggaactcttaaacgc

SEQ ID NO: 158382 - DNA, 15 bp, Homo sapiens
gaactcttaaacgcc

SEQ ID NO: 158383 - DNA, 15 bp, Homo sapiens
aactcttaaacgccc

SEQ ID NO: 158384 - DNA, 15 bp, Homo sapiens
actcttaaacgccct

SEQ ID NO: 158385 - DNA, 15 bp, Homo sapiens
ctcttaaacgccctc

SEQ ID NO: 158386 - DNA, 15 bp, Homo sapiens
tcttaaacgccctca

SEQ ID NO: 158387 - DNA, 15 bp, Homo sapiens
cttaaacgccctcac

SEQ ID NO: 158388 - DNA, 15 bp, Homo sapiens
ttaaacgccctcacc

SEQ ID NO: 158389 - DNA, 15 bp, Homo sapiens
taaacgccctcacca

SEQ ID NO: 158390 - DNA, 15 bp, Homo sapiens
aaacgccctcaccaa

SEQ ID NO: 158391 - DNA, 15 bp, Homo sapiens
aacgccctcaccaaa

SEQ ID NO: 158392 - DNA, 15 bp, Homo sapiens
acgccctcaccaaag

SEQ ID NO: 158393 - DNA, 15 bp, Homo sapiens
cgccctcaccaaaga

SEQ ID NO: 158394 - DNA, 15 bp, Homo sapiens
gccctcaccaaagac

SEQ ID NO: 158395 - DNA, 15 bp, Homo sapiens
ccctcaccaaagacc

SEQ ID NO: 158396 - DNA, 15 bp, Homo sapiens
cctcaccaaagaccc

SEQ ID NO: 158397 - DNA, 15 bp, Homo sapiens
ctcaccaaagaccct

SEQ ID NO: 158398 - DNA, 15 bp, Homo sapiens
tcaccaaagaccctg

SEQ ID NO: 158399 - DNA, 15 bp, Homo sapiens
caccaaagaccctgg

SEQ ID NO: 158400 - DNA, 15 bp, Homo sapiens
accaaagaccctggc

SEQ ID NO: 158401 - DNA, 15 bp, Homo sapiens
ccaaagaccctggct

SEQ ID NO: 158402 - DNA, 15 bp, Homo sapiens
caaagaccctggctt

SEQ ID NO: 158403 - DNA, 15 bp, Homo sapiens
aaagaccctggcttc

SEQ ID NO: 158404 - DNA, 15 bp, Homo sapiens
aagaccctggcttcg

SEQ ID NO: 158405 - DNA, 15 bp, Homo sapiens
agaccctggcttcgg

SEQ ID NO: 158406 - DNA, 15 bp, Homo sapiens
gaccctggcttcggg

SEQ ID NO: 158407 - DNA, 15 bp, Homo sapiens
accctggcttcggga

SEQ ID NO: 158408 - DNA, 15 bp, Homo sapiens
ccctggcttcgggac

SEQ ID NO: 158409 - DNA, 15 bp, Homo sapiens
cctggcttcgggacc

SEQ ID NO: 158410 - DNA, 15 bp, Homo sapiens
ctggcttcgggaccc

SEQ ID NO: 158411 - DNA, 15 bp, Homo sapiens
tggcttcgggacccg

SEQ ID NO: 158412 - DNA, 15 bp, Homo sapiens
ggcttcgggacccgc

SEQ ID NO: 158413 - DNA, 15 bp, Homo sapiens
gcttcgggacccgct

SEQ ID NO: 158414 - DNA, 15 bp, Homo sapiens
cttcgggacccgctg

SEQ ID NO: 158415 - DNA, 15 bp, Homo sapiens
ttcgggacccgctgt

SEQ ID NO: 158416 - DNA, 15 bp, Homo sapiens
tcgggacccgctgta

SEQ ID NO: 158417 - DNA, 15 bp, Homo sapiens
cgggacccgctgtat

SEQ ID NO: 158418 - DNA, 15 bp, Homo sapiens
gggacccgctgtatg

SEQ ID NO: 158419 - DNA, 15 bp, Homo sapiens
ggacccgctgtatgg

SEQ ID NO: 158420 - DNA, 15 bp, Homo sapiens
gacccgctgtatgga

SEQ ID NO: 158421 - DNA, 15 bp, Homo sapiens
acccgctgtatggaa

SEQ ID NO: 158422 - DNA, 15 bp, Homo sapiens
cccgctgtatggaag

SEQ ID NO: 158423 - DNA, 15 bp, Homo sapiens
ccgctgtatggaagg

SEQ ID NO: 158424 - DNA, 15 bp, Homo sapiens
cgctgtatggaagga

SEQ ID NO: 158425 - DNA, 15 bp, Homo sapiens
gctgtatggaaggaa

SEQ ID NO: 158426 - DNA, 15 bp, Homo sapiens
ctgtatggaaggaaa

SEQ ID NO: 158427 - DNA, 15 bp, Homo sapiens
tgtatggaaggaaac

SEQ ID NO: 158428 - DNA, 15 bp, Homo sapiens
gtatggaaggaaacc

SEQ ID NO: 158429 - DNA, 15 bp, Homo sapiens
tatggaaggaaaccc

SEQ ID NO: 158430 - DNA, 15 bp, Homo sapiens
atggaaggaaaccca

SEQ ID NO: 158431 - DNA, 15 bp, Homo sapiens
tggaaggaaacccaa

SEQ ID NO: 158432 - DNA, 15 bp, Homo sapiens
ggaaggaaacccaat

SEQ ID NO: 158433 - DNA, 15 bp, Homo sapiens
gaaggaaacccaatc

SEQ ID NO: 158434 - DNA, 15 bp, Homo sapiens
aaggaaacccaatcc

SEQ ID NO: 158435 - DNA, 15 bp, Homo sapiens
aggaaacccaatccc

SEQ ID NO: 158436 - DNA, 15 bp, Homo sapiens
ggaaacccaatcccg

SEQ ID NO: 158437 - DNA, 15 bp, Homo sapiens
gaaacccaatcccgt

SEQ ID NO: 158438 - DNA, 15 bp, Homo sapiens
aaacccaatcccgtg

SEQ ID NO: 158439 - DNA, 15 bp, Homo sapiens
aacccaatcccgtga

SEQ ID NO: 158440 - DNA, 15 bp, Homo sapiens
acccaatcccgtgag

SEQ ID NO: 158441 - DNA, 15 bp, Homo sapiens
cccaatcccgtgagt

SEQ ID NO: 158442 - DNA, 15 bp, Homo sapiens
ccaatcccgtgagtg

SEQ ID NO: 158443 - DNA, 15 bp, Homo sapiens
caatcccgtgagtgc

SEQ ID NO: 158444 - DNA, 15 bp, Homo sapiens
aatcccgtgagtgcc

SEQ ID NO: 158445 - DNA, 15 bp, Homo sapiens
atcccgtgagtgcca

SEQ ID NO: 158446 - DNA, 15 bp, Homo sapiens
tcccgtgagtgccac

SEQ ID NO: 158447 - DNA, 15 bp, Homo sapiens
cccgtgagtgccact

SEQ ID NO: 158448 - DNA, 15 bp, Homo sapiens
ccgtgagtgccactt

SEQ ID NO: 158449 - DNA, 15 bp, Homo sapiens
cgtgagtgccacttt

SEQ ID NO: 158450 - DNA, 15 bp, Homo sapiens
gtgagtgccacttta

SEQ ID NO: 158451 - DNA, 15 bp, Homo sapiens
tgagtgccactttag

SEQ ID NO: 158452 - DNA, 15 bp, Homo sapiens
gagtgccactttagc

SEQ ID NO: 158453 - DNA, 15 bp, Homo sapiens
agtgccactttagcc

SEQ ID NO: 158454 - DNA, 15 bp, Homo sapiens
gtgccactttagcca

SEQ ID NO: 158455 - DNA, 15 bp, Homo sapiens
tgccactttagccat

SEQ ID NO: 158456 - DNA, 15 bp, Homo sapiens
gccactttagccata

SEQ ID NO: 158457 - DNA, 15 bp, Homo sapiens
ccactttagccataa

SEQ ID NO: 158458 - DNA, 15 bp, Homo sapiens
cactttagccataag

SEQ ID NO: 158459 - DNA, 15 bp, Homo sapiens
actttagccataagc

SEQ ID NO: 158460 - DNA, 15 bp, Homo sapiens
ctttagccataagca

SEQ ID NO: 158461 - DNA, 15 bp, Homo sapiens
tttagccataagcag

SEQ ID NO: 158462 - DNA, 15 bp, Homo sapiens
ttagccataagcagg

SEQ ID NO: 158463 - DNA, 15 bp, Homo sapiens
tagccataagcaggc

SEQ ID NO: 158464 - DNA, 15 bp, Homo sapiens
agccataagcaggct

SEQ ID NO: 158465 - DNA, 15 bp, Homo sapiens
gccataagcaggctt

SEQ ID NO: 158466 - DNA, 15 bp, Homo sapiens
ccataagcaggcttc

SEQ ID NO: 158467 - DNA, 15 bp, Homo sapiens
cataagcaggcttct

SEQ ID NO: 158468 - DNA, 15 bp, Homo sapiens
ataagcaggcttctt

SEQ ID NO: 158469 - DNA, 15 bp, Homo sapiens
taagcaggcttcttg

SEQ ID NO: 158470 - DNA, 15 bp, Homo sapiens
aagcaggcttcttgt

SEQ ID NO: 158471 - DNA, 15 bp, Homo sapiens
agcaggcttcttgtg

SEQ ID NO: 158472 - DNA, 15 bp, Homo sapiens
gcaggcttcttgtgc

SEQ ID NO: 158473 - DNA, 15 bp, Homo sapiens
caggcttcttgtgct

SEQ ID NO: 158474 - DNA, 15 bp, Homo sapiens
aggcttcttgtgctt

SEQ ID NO: 158475 - DNA, 15 bp, Homo sapiens
ggcttcttgtgcttg

SEQ ID NO: 158476 - DNA, 15 bp, Homo sapiens
gcttcttgtgcttgt

SEQ ID NO: 158477 - DNA, 15 bp, Homo sapiens
cttcttgtgcttgtt

SEQ ID NO: 158478 - DNA, 15 bp, Homo sapiens
ttcttgtgcttgttg

SEQ ID NO: 158479 - DNA, 15 bp, Homo sapiens
tcttgtgcttgttgc

SEQ ID NO: 158480 - DNA, 15 bp, Homo sapiens
cttgtgcttgttgcc

SEQ ID NO: 158481 - DNA, 15 bp, Homo sapiens
ttgtgcttgttgcct

SEQ ID NO: 158482 - DNA, 15 bp, Homo sapiens
tgtgcttgttgcctg

SEQ ID NO: 158483 - DNA, 15 bp, Homo sapiens
gtgcttgttgcctgg

SEQ ID NO: 158484 - DNA, 15 bp, Homo sapiens
tgcttgttgcctggt

SEQ ID NO: 158485 - DNA, 15 bp, Homo sapiens
gcttgttgcctggtt

SEQ ID NO: 158486 - DNA, 15 bp, Homo sapiens
cttgttgcctggttt

SEQ ID NO: 158487 - DNA, 15 bp, Homo sapiens
ttgttgcctggtttg

SEQ ID NO: 158488 - DNA, 15 bp, Homo sapiens
tgttgcctggtttga

SEQ ID NO: 158489 - DNA, 15 bp, Homo sapiens
gttgcctggtttgat

SEQ ID NO: 158490 - DNA, 15 bp, Homo sapiens
ttgcctggtttgatt

SEQ ID NO: 158491 - DNA, 15 bp, Homo sapiens
tgcctggtttgattt

SEQ ID NO: 158492 - DNA, 15 bp, Homo sapiens
gcctggtttgatttc

SEQ ID NO: 158493 - DNA, 15 bp, Homo sapiens
cctggtttgatttct

SEQ ID NO: 158494 - DNA, 15 bp, Homo sapiens
ctggtttgatttcta

SEQ ID NO: 158495 - DNA, 15 bp, Homo sapiens
tggtttgatttctaa

SEQ ID NO: 158496 - DNA, 15 bp, Homo sapiens
ggtttgatttctaat

SEQ ID NO: 158497 - DNA, 15 bp, Homo sapiens
gtttgatttctaata

SEQ ID NO: 158498 - DNA, 15 bp, Homo sapiens
tttgatttctaatat

SEQ ID NO: 158499 - DNA, 15 bp, Homo sapiens
ttgatttctaatatg

SEQ ID NO: 158500 - DNA, 15 bp, Homo sapiens
tgatttctaatatgc

SEQ ID NO: 158501 - DNA, 15 bp, Homo sapiens
gatttctaatatgct

SEQ ID NO: 158502 - DNA, 15 bp, Homo sapiens
atttctaatatgctg

SEQ ID NO: 158503 - DNA, 15 bp, Homo sapiens
tttctaatatgctgc

SEQ ID NO: 158504 - DNA, 15 bp, Homo sapiens
ttctaatatgctgca

SEQ ID NO: 158505 - DNA, 15 bp, Homo sapiens
tctaatatgctgcat

SEQ ID NO: 158506 - DNA, 15 bp, Homo sapiens
ctaatatgctgcatt

SEQ ID NO: 158507 - DNA, 15 bp, Homo sapiens
taatatgctgcattt

SEQ ID NO: 158508 - DNA, 15 bp, Homo sapiens
aatatgctgcattta

SEQ ID NO: 158509 - DNA, 15 bp, Homo sapiens
atatgctgcatttat

SEQ ID NO: 158510 - DNA, 15 bp, Homo sapiens
tatgctgcatttatc

SEQ ID NO: 158511 - DNA, 15 bp, Homo sapiens
atgctgcatttatca

SEQ ID NO: 158512 - DNA, 15 bp, Homo sapiens
tgctgcatttatcaa

SEQ ID NO: 158513 - DNA, 15 bp, Homo sapiens
gctgcatttatcaac

SEQ ID NO: 158514 - DNA, 15 bp, Homo sapiens
ctgcatttatcaact

SEQ ID NO: 158515 - DNA, 15 bp, Homo sapiens
tgcatttatcaactg

SEQ ID NO: 158516 - DNA, 15 bp, Homo sapiens
gcatttatcaactgc

SEQ ID NO: 158517 - DNA, 15 bp, Homo sapiens
catttatcaactgca

SEQ ID NO: 158518 - DNA, 15 bp, Homo sapiens
atttatcaactgcat

SEQ ID NO: 158519 - DNA, 15 bp, Homo sapiens
tttatcaactgcatg

SEQ ID NO: 158520 - DNA, 15 bp, Homo sapiens
ttatcaactgcatgc

SEQ ID NO: 158521 - DNA, 15 bp, Homo sapiens
tatcaactgcatgcc

SEQ ID NO: 158522 - DNA, 15 bp, Homo sapiens
atcaactgcatgcca

SEQ ID NO: 158523 - DNA, 15 bp, Homo sapiens
tcaactgcatgccac

SEQ ID NO: 158524 - DNA, 15 bp, Homo sapiens
caactgcatgccaca

SEQ ID NO: 158525 - DNA, 15 bp, Homo sapiens
aactgcatgccacat

SEQ ID NO: 158526 - DNA, 15 bp, Homo sapiens
actgcatgccacatt

SEQ ID NO: 158527 - DNA, 15 bp, Homo sapiens
ctgcatgccacattg

SEQ ID NO: 158528 - DNA, 15 bp, Homo sapiens
tgcatgccacattgt

SEQ ID NO: 158529 - DNA, 15 bp, Homo sapiens
gcatgccacattgtg

SEQ ID NO: 158530 - DNA, 15 bp, Homo sapiens
catgccacattgtga

SEQ ID NO: 158531 - DNA, 15 bp, Homo sapiens
atgccacattgtgac

SEQ ID NO: 158532 - DNA, 15 bp, Homo sapiens
tgccacattgtgacc

SEQ ID NO: 158533 - DNA, 15 bp, Homo sapiens
gccacattgtgaccg

SEQ ID NO: 158534 - DNA, 15 bp, Homo sapiens
ccacattgtgaccgc

SEQ ID NO: 158535 - DNA, 15 bp, Homo sapiens
cacattgtgaccgcc

SEQ ID NO: 158536 - DNA, 15 bp, Homo sapiens
acattgtgaccgcca

SEQ ID NO: 158537 - DNA, 15 bp, Homo sapiens
cattgtgaccgccag

SEQ ID NO: 158538 - DNA, 15 bp, Homo sapiens
attgtgaccgccagc

SEQ ID NO: 158539 - DNA, 15 bp, Homo sapiens
ttgtgaccgccagca

SEQ ID NO: 158540 - DNA, 15 bp, Homo sapiens
tgtgaccgccagcat

SEQ ID NO: 158541 - DNA, 15 bp, Homo sapiens
gtgaccgccagcatt

SEQ ID NO: 158542 - DNA, 15 bp, Homo sapiens
tgaccgccagcattt

SEQ ID NO: 158543 - DNA, 15 bp, Homo sapiens
gaccgccagcatttg

SEQ ID NO: 158544 - DNA, 15 bp, Homo sapiens
accgccagcatttgc

SEQ ID NO: 158545 - DNA, 15 bp, Homo sapiens
ccgccagcatttgcc

SEQ ID NO: 158546 - DNA, 15 bp, Homo sapiens
cgccagcatttgccc

SEQ ID NO: 158547 - DNA, 15 bp, Homo sapiens
gccagcatttgccct

SEQ ID NO: 158548 - DNA, 15 bp, Homo sapiens
ccagcatttgccctt

SEQ ID NO: 158549 - DNA, 15 bp, Homo sapiens
cagcatttgcccttt

SEQ ID NO: 158550 - DNA, 15 bp, Homo sapiens
agcatttgccctttg

SEQ ID NO: 158551 - DNA, 15 bp, Homo sapiens
gcatttgccctttga

SEQ ID NO: 158552 - DNA, 15 bp, Homo sapiens
catttgccctttgaa

SEQ ID NO: 158553 - DNA, 15 bp, Homo sapiens
atttgccctttgaat

SEQ ID NO: 158554 - DNA, 15 bp, Homo sapiens
tttgccctttgaatt

SEQ ID NO: 158555 - DNA, 15 bp, Homo sapiens
ttgccctttgaatta

SEQ ID NO: 158556 - DNA, 15 bp, Homo sapiens
tgccctttgaattat

SEQ ID NO: 158557 - DNA, 15 bp, Homo sapiens
gccctttgaattatt

SEQ ID NO: 158558 - DNA, 15 bp, Homo sapiens
ccctttgaattatta

SEQ ID NO: 158559 - DNA, 15 bp, Homo sapiens
cctttgaattattat

SEQ ID NO: 158560 - DNA, 15 bp, Homo sapiens
ctttgaattattatt

SEQ ID NO: 158561 - DNA, 15 bp, Homo sapiens
tttgaattattatta

SEQ ID NO: 158562 - DNA, 15 bp, Homo sapiens
ttgaattattattat

SEQ ID NO: 158563 - DNA, 15 bp, Homo sapiens
tgaattattattatg

SEQ ID NO: 158564 - DNA, 15 bp, Homo sapiens
gaattattattatgt

SEQ ID NO: 158565 - DNA, 15 bp, Homo sapiens
aattattattatgtt

SEQ ID NO: 158566 - DNA, 15 bp, Homo sapiens
attattattatgttt

SEQ ID NO: 158567 - DNA, 15 bp, Homo sapiens
ttattattatgtttt

SEQ ID NO: 158568 - DNA, 15 bp, Homo sapiens
tattattatgtttta

SEQ ID NO: 158569 - DNA, 15 bp, Homo sapiens
attattatgttttat

SEQ ID NO: 158570 - DNA, 15 bp, Homo sapiens
ttattatgttttatt

SEQ ID NO: 158571 - DNA, 15 bp, Homo sapiens
tattatgttttattt

SEQ ID NO: 158572 - DNA, 15 bp, Homo sapiens
attatgttttattta

SEQ ID NO: 158573 - DNA, 15 bp, Homo sapiens
ttatgttttatttac

SEQ ID NO: 158574 - DNA, 15 bp, Homo sapiens
tatgttttatttaca

SEQ ID NO: 158575 - DNA, 15 bp, Homo sapiens
atgttttatttacaa

SEQ ID NO: 158576 - DNA, 15 bp, Homo sapiens
tgttttatttacaaa

SEQ ID NO: 158577 - DNA, 15 bp, Homo sapiens
gttttatttacaaaa

SEQ ID NO: 158578 - DNA, 15 bp, Homo sapiens
ttttatttacaaaaa

SEQ ID NO: 158579 - DNA, 15 bp, Homo sapiens
tttatttacaaaaag

SEQ ID NO: 158580 - DNA, 15 bp, Homo sapiens
ttatttacaaaaagc

SEQ ID NO: 158581 - DNA, 15 bp, Homo sapiens
tatttacaaaaagcg

SEQ ID NO: 158582 - DNA, 15 bp, Homo sapiens
atttacaaaaagcga

SEQ ID NO: 158583 - DNA, 15 bp, Homo sapiens
tttacaaaaagcgaa

SEQ ID NO: 158584 - DNA, 15 bp, Homo sapiens
ttacaaaaagcgaag

SEQ ID NO: 158585 - DNA, 15 bp, Homo sapiens
tacaaaaagcgaagg

SEQ ID NO: 158586 - DNA, 15 bp, Homo sapiens
acaaaaagcgaaggt

SEQ ID NO: 158587 - DNA, 15 bp, Homo sapiens
caaaaagcgaaggta

SEQ ID NO: 158588 - DNA, 15 bp, Homo sapiens
aaaaagcgaaggtag

SEQ ID NO: 158589 - DNA, 15 bp, Homo sapiens
aaaagcgaaggtagt

SEQ ID NO: 158590 - DNA, 15 bp, Homo sapiens
aaagcgaaggtagta

SEQ ID NO: 158591 - DNA, 15 bp, Homo sapiens
aagcgaaggtagtaa

SEQ ID NO: 158592 - DNA, 15 bp, Homo sapiens
agcgaaggtagtaac

SEQ ID NO: 158593 - DNA, 15 bp, Homo sapiens
gcgaaggtagtaacc

SEQ ID NO: 158594 - DNA, 15 bp, Homo sapiens
cgaaggtagtaaccg

SEQ ID NO: 158595 - DNA, 15 bp, Homo sapiens
gaaggtagtaaccga

SEQ ID NO: 158596 - DNA, 15 bp, Homo sapiens
aaggtagtaaccgaa

SEQ ID NO: 158597 - DNA, 15 bp, Homo sapiens
aggtagtaaccgaac

SEQ ID NO: 158598 - DNA, 15 bp, Homo sapiens
ggtagtaaccgaact

SEQ ID NO: 158599 - DNA, 15 bp, Homo sapiens
gtagtaaccgaacta

SEQ ID NO: 158600 - DNA, 15 bp, Homo sapiens
tagtaaccgaactaa

SEQ ID NO: 158601 - DNA, 15 bp, Homo sapiens
agtaaccgaactaaa

SEQ ID NO: 158602 - DNA, 15 bp, Homo sapiens
gtaaccgaactaaat

SEQ ID NO: 158603 - DNA, 15 bp, Homo sapiens
taaccgaactaaatt

SEQ ID NO: 158604 - DNA, 15 bp, Homo sapiens
aaccgaactaaatta

SEQ ID NO: 158605 - DNA, 15 bp, Homo sapiens
accgaactaaattat

SEQ ID NO: 158606 - DNA, 15 bp, Homo sapiens
ccgaactaaattatc

SEQ ID NO: 158607 - DNA, 15 bp, Homo sapiens
cgaactaaattatct

SEQ ID NO: 158608 - DNA, 15 bp, Homo sapiens
gaactaaattatcta

SEQ ID NO: 158609 - DNA, 15 bp, Homo sapiens
aactaaattatctag

SEQ ID NO: 158610 - DNA, 15 bp, Homo sapiens
actaaattatctagg

SEQ ID NO: 158611 - DNA, 15 bp, Homo sapiens
ctaaattatctagga

SEQ ID NO: 158612 - DNA, 15 bp, Homo sapiens
taaattatctaggaa

SEQ ID NO: 158613 - DNA, 15 bp, Homo sapiens
aaattatctaggaac

SEQ ID NO: 158614 - DNA, 15 bp, Homo sapiens
aattatctaggaaca

SEQ ID NO: 158615 - DNA, 15 bp, Homo sapiens
attatctaggaacaa

SEQ ID NO: 158616 - DNA, 15 bp, Homo sapiens
ttatctaggaacaaa

SEQ ID NO: 158617 - DNA, 15 bp, Homo sapiens
tatctaggaacaaac

SEQ ID NO: 158618 - DNA, 15 bp, Homo sapiens
atctaggaacaaacg

SEQ ID NO: 158619 - DNA, 15 bp, Homo sapiens
tctaggaacaaacgt

SEQ ID NO: 158620 - DNA, 15 bp, Homo sapiens
ctaggaacaaacgtt

SEQ ID NO: 158621 - DNA, 15 bp, Homo sapiens
taggaacaaacgttt

SEQ ID NO: 158622 - DNA, 15 bp, Homo sapiens
aggaacaaacgtttg

SEQ ID NO: 158623 - DNA, 15 bp, Homo sapiens
ggaacaaacgtttgg

SEQ ID NO: 158624 - DNA, 15 bp, Homo sapiens
gaacaaacgtttgga

SEQ ID NO: 158625 - DNA, 15 bp, Homo sapiens
aacaaacgtttggag

SEQ ID NO: 158626 - DNA, 15 bp, Homo sapiens
acaaacgtttggaga

SEQ ID NO: 158627 - DNA, 15 bp, Homo sapiens
caaacgtttggagag

SEQ ID NO: 158628 - DNA, 15 bp, Homo sapiens
aaacgtttggagagt

SEQ ID NO: 158629 - DNA, 15 bp, Homo sapiens
aacgtttggagagtc

SEQ ID NO: 158630 - DNA, 15 bp, Homo sapiens
acgtttggagagtct

SEQ ID NO: 158631 - DNA, 15 bp, Homo sapiens
cgtttggagagtctt

SEQ ID NO: 158632 - DNA, 15 bp, Homo sapiens
gtttggagagtcttc

SEQ ID NO: 158633 - DNA, 15 bp, Homo sapiens
tttggagagtcttct

SEQ ID NO: 158634 - DNA, 15 bp, Homo sapiens
ttggagagtcttcta

SEQ ID NO: 158635 - DNA, 15 bp, Homo sapiens
tggagagtcttctaa

SEQ ID NO: 158636 - DNA, 15 bp, Homo sapiens
ggagagtcttctaac

SEQ ID NO: 158637 - DNA, 15 bp, Homo sapiens
gagagtcttctaaca

SEQ ID NO: 158638 - DNA, 15 bp, Homo sapiens
agagtcttctaacac

SEQ ID NO: 158639 - DNA, 15 bp, Homo sapiens
gagtcttctaacacc

SEQ ID NO: 158640 - DNA, 15 bp, Homo sapiens
agtcttctaacaccg

SEQ ID NO: 158641 - DNA, 15 bp, Homo sapiens
gtcttctaacaccgt

SEQ ID NO: 158642 - DNA, 15 bp, Homo sapiens
tcttctaacaccgtg

SEQ ID NO: 158643 - DNA, 15 bp, Homo sapiens
cttctaacaccgtgc

SEQ ID NO: 158644 - DNA, 15 bp, Homo sapiens
ttctaacaccgtgca

SEQ ID NO: 158645 - DNA, 15 bp, Homo sapiens
tctaacaccgtgcaa

SEQ ID NO: 158646 - DNA, 15 bp, Homo sapiens
ctaacaccgtgcaaa

SEQ ID NO: 158647 - DNA, 15 bp, Homo sapiens
taacaccgtgcaaag

SEQ ID NO: 158648 - DNA, 15 bp, Homo sapiens
aacaccgtgcaaagc

SEQ ID NO: 158649 - DNA, 15 bp, Homo sapiens
acaccgtgcaaagca

SEQ ID NO: 158650 - DNA, 15 bp, Homo sapiens
caccgtgcaaagcac

SEQ ID NO: 158651 - DNA, 15 bp, Homo sapiens
accgtgcaaagcacg

SEQ ID NO: 158652 - DNA, 15 bp, Homo sapiens
ccgtgcaaagcacgt

SEQ ID NO: 158653 - DNA, 15 bp, Homo sapiens
cgtgcaaagcacgtc

SEQ ID NO: 158654 - DNA, 15 bp, Homo sapiens
gtgcaaagcacgtca

SEQ ID NO: 158655 - DNA, 15 bp, Homo sapiens
tgcaaagcacgtcat

SEQ ID NO: 158656 - DNA, 15 bp, Homo sapiens
gcaaagcacgtcatt

SEQ ID NO: 158657 - DNA, 15 bp, Homo sapiens
caaagcacgtcatta

SEQ ID NO: 158658 - DNA, 15 bp, Homo sapiens
aaagcacgtcattac

SEQ ID NO: 158659 - DNA, 15 bp, Homo sapiens
aagcacgtcattaca

SEQ ID NO: 158660 - DNA, 15 bp, Homo sapiens
agcacgtcattacag

SEQ ID NO: 158661 - DNA, 15 bp, Homo sapiens
gcacgtcattacaga

SEQ ID NO: 158662 - DNA, 15 bp, Homo sapiens
cacgtcattacagac

SEQ ID NO: 158663 - DNA, 15 bp, Homo sapiens
acgtcattacagaca

SEQ ID NO: 158664 - DNA, 15 bp, Homo sapiens
cgtcattacagacat

SEQ ID NO: 158665 - DNA, 15 bp, Homo sapiens
gtcattacagacatt

SEQ ID NO: 158666 - DNA, 15 bp, Homo sapiens
tcattacagacattt

SEQ ID NO: 158667 - DNA, 15 bp, Homo sapiens
cattacagacatttg

SEQ ID NO: 158668 - DNA, 15 bp, Homo sapiens
attacagacatttgt

SEQ ID NO: 158669 - DNA, 15 bp, Homo sapiens
ttacagacatttgtt

SEQ ID NO: 158670 - DNA, 15 bp, Homo sapiens
tacagacatttgttt

SEQ ID NO: 158671 - DNA, 15 bp, Homo sapiens
acagacatttgttta

SEQ ID NO: 158672 - DNA, 15 bp, Homo sapiens
cagacatttgtttac

SEQ ID NO: 158673 - DNA, 15 bp, Homo sapiens
agacatttgtttact

SEQ ID NO: 158674 - DNA, 15 bp, Homo sapiens
gacatttgtttactg

SEQ ID NO: 158675 - DNA, 15 bp, Homo sapiens
acatttgtttactga

SEQ ID NO: 158676 - DNA, 15 bp, Homo sapiens
catttgtttactgat

SEQ ID NO: 158677 - DNA, 15 bp, Homo sapiens
atttgtttactgatt

SEQ ID NO: 158678 - DNA, 15 bp, Homo sapiens
tttgtttactgattt

SEQ ID NO: 158679 - DNA, 15 bp, Homo sapiens
ttgtttactgattta

SEQ ID NO: 158680 - DNA, 15 bp, Homo sapiens
tgtttactgatttag

SEQ ID NO: 158681 - DNA, 15 bp, Homo sapiens
gtttactgatttaga

SEQ ID NO: 158682 - DNA, 15 bp, Homo sapiens
tttactgatttagaa

SEQ ID NO: 158683 - DNA, 15 bp, Homo sapiens
ttactgatttagaac

SEQ ID NO: 158684 - DNA, 15 bp, Homo sapiens
tactgatttagaacc

SEQ ID NO: 158685 - DNA, 15 bp, Homo sapiens
actgatttagaacct

SEQ ID NO: 158686 - DNA, 15 bp, Homo sapiens
ctgatttagaacctt

SEQ ID NO: 158687 - DNA, 15 bp, Homo sapiens
tgatttagaacctta

SEQ ID NO: 158688 - DNA, 15 bp, Homo sapiens
gatttagaaccttaa

SEQ ID NO: 158689 - DNA, 15 bp, Homo sapiens
atttagaaccttaat

SEQ ID NO: 158690 - DNA, 15 bp, Homo sapiens
tttagaaccttaata

SEQ ID NO: 158691 - DNA, 15 bp, Homo sapiens
ttagaaccttaatat

SEQ ID NO: 158692 - DNA, 15 bp, Homo sapiens
tagaaccttaatatt

SEQ ID NO: 158693 - DNA, 15 bp, Homo sapiens
agaaccttaatattt

SEQ ID NO: 158694 - DNA, 15 bp, Homo sapiens
gaaccttaatattta

SEQ ID NO: 158695 - DNA, 15 bp, Homo sapiens
aaccttaatatttaa

SEQ ID NO: 158696 - DNA, 15 bp, Homo sapiens
accttaatatttaat

SEQ ID NO: 158697 - DNA, 15 bp, Homo sapiens
ccttaatatttaatt

SEQ ID NO: 158698 - DNA, 15 bp, Homo sapiens
cttaatatttaattt

SEQ ID NO: 158699 - DNA, 15 bp, Homo sapiens
taatatttaatttaa

SEQ ID NO: 158700 - DNA, 15 bp, Homo sapiens
aatatttaatttaaa

SEQ ID NO: 158701 - DNA, 15 bp, Homo sapiens
atatttaatttaaat

SEQ ID NO: 158702 - DNA, 15 bp, Homo sapiens
tatttaatttaaata

SEQ ID NO: 158703 - DNA, 15 bp, Homo sapiens
atttaatttaaatag

SEQ ID NO: 158704 - DNA, 15 bp, Homo sapiens
tttaatttaaatagc

SEQ ID NO: 158705 - DNA, 15 bp, Homo sapiens
ttaatttaaatagca

SEQ ID NO: 158706 - DNA, 15 bp, Homo sapiens
taatttaaatagcac

SEQ ID NO: 158707 - DNA, 15 bp, Homo sapiens
aatttaaatagcact

SEQ ID NO: 158708 - DNA, 15 bp, Homo sapiens
atttaaatagcactt

SEQ ID NO: 158709 - DNA, 15 bp, Homo sapiens
tttaaatagcacttt

SEQ ID NO: 158710 - DNA, 15 bp, Homo sapiens
ttaaatagcacttta

SEQ ID NO: 158711 - DNA, 15 bp, Homo sapiens
taaatagcactttac

SEQ ID NO: 158712 - DNA, 15 bp, Homo sapiens
aaatagcactttaca

SEQ ID NO: 158713 - DNA, 15 bp, Homo sapiens
aatagcactttacac

SEQ ID NO: 158714 - DNA, 15 bp, Homo sapiens
atagcactttacact

SEQ ID NO: 158715 - DNA, 15 bp, Homo sapiens
tagcactttacactt

SEQ ID NO: 158716 - DNA, 15 bp, Homo sapiens
agcactttacactta

SEQ ID NO: 158717 - DNA, 15 bp, Homo sapiens
gcactttacacttac

SEQ ID NO: 158718 - DNA, 15 bp, Homo sapiens
cactttacacttact

SEQ ID NO: 158719 - DNA, 15 bp, Homo sapiens
actttacacttactg

SEQ ID NO: 158720 - DNA, 15 bp, Homo sapiens
ctttacacttactga

SEQ ID NO: 158721 - DNA, 15 bp, Homo sapiens
tttacacttactgat

SEQ ID NO: 158722 - DNA, 15 bp, Homo sapiens
ttacacttactgatg

SEQ ID NO: 158723 - DNA, 15 bp, Homo sapiens
tacacttactgatga

SEQ ID NO: 158724 - DNA, 15 bp, Homo sapiens
acacttactgatgaa

SEQ ID NO: 158725 - DNA, 15 bp, Homo sapiens
cacttactgatgaaa

SEQ ID NO: 158726 - DNA, 15 bp, Homo sapiens
acttactgatgaaat

SEQ ID NO: 158727 - DNA, 15 bp, Homo sapiens
cttactgatgaaatg

SEQ ID NO: 158728 - DNA, 15 bp, Homo sapiens
ttactgatgaaatgc

SEQ ID NO: 158729 - DNA, 15 bp, Homo sapiens
tactgatgaaatgct

SEQ ID NO: 158730 - DNA, 15 bp, Homo sapiens
actgatgaaatgctt

SEQ ID NO: 158731 - DNA, 15 bp, Homo sapiens
ctgatgaaatgcttt

SEQ ID NO: 158732 - DNA, 15 bp, Homo sapiens
tgatgaaatgctttt

SEQ ID NO: 158733 - DNA, 15 bp, Homo sapiens
gatgaaatgcttttc

SEQ ID NO: 158734 - DNA, 15 bp, Homo sapiens
atgaaatgcttttcc

SEQ ID NO: 158735 - DNA, 15 bp, Homo sapiens
tgaaatgcttttcct

SEQ ID NO: 158736 - DNA, 15 bp, Homo sapiens
gaaatgcttttcctt

SEQ ID NO: 158737 - DNA, 15 bp, Homo sapiens
aaatgcttttccttt

SEQ ID NO: 158738 - DNA, 15 bp, Homo sapiens
aatgcttttcctttc

SEQ ID NO: 158739 - DNA, 15 bp, Homo sapiens
atgcttttcctttct

SEQ ID NO: 158740 - DNA, 15 bp, Homo sapiens
tgcttttcctttctt

SEQ ID NO: 158741 - DNA, 15 bp, Homo sapiens
gcttttcctttcttt

SEQ ID NO: 158742 - DNA, 15 bp, Homo sapiens
cttttcctttctttc

SEQ ID NO: 158743 - DNA, 15 bp, Homo sapiens
ttttcctttctttct

SEQ ID NO: 158744 - DNA, 15 bp, Homo sapiens
tcctttctttctctc

SEQ ID NO: 158745 - DNA, 15 bp, Homo sapiens
cctttctttctctcc

SEQ ID NO: 158746 - DNA, 15 bp, Homo sapiens
ctttctttctctccc

SEQ ID NO: 158747 - DNA, 15 bp, Homo sapiens
tttctttctctccca

SEQ ID NO: 158748 - DNA, 15 bp, Homo sapiens
ttctttctctcccag

SEQ ID NO: 158749 - DNA, 15 bp, Homo sapiens
tctttctctcccagc

SEQ ID NO: 158750 - DNA, 15 bp, Homo sapiens
ctttctctcccagcc

SEQ ID NO: 158751 - DNA, 15 bp, Homo sapiens
tttctctcccagccc

SEQ ID NO: 158752 - DNA, 15 bp, Homo sapiens
ttctctcccagcccc

SEQ ID NO: 158753 - DNA, 15 bp, Homo sapiens
tctctcccagcccct

SEQ ID NO: 158754 - DNA, 15 bp, Homo sapiens
ctctcccagcccctg

SEQ ID NO: 158755 - DNA, 15 bp, Homo sapiens
tctcccagcccctgt

SEQ ID NO: 158756 - DNA, 15 bp, Homo sapiens
ctcccagcccctgta

SEQ ID NO: 158757 - DNA, 15 bp, Homo sapiens
tcccagcccctgtac

SEQ ID NO: 158758 - DNA, 15 bp, Homo sapiens
cccagcccctgtact

SEQ ID NO: 158759 - DNA, 15 bp, Homo sapiens
ccagcccctgtactt

SEQ ID NO: 158760 - DNA, 15 bp, Homo sapiens
cagcccctgtactta

SEQ ID NO: 158761 - DNA, 15 bp, Homo sapiens
agcccctgtacttaa

SEQ ID NO: 158762 - DNA, 15 bp, Homo sapiens
gcccctgtacttaag

SEQ ID NO: 158763 - DNA, 15 bp, Homo sapiens
cccctgtacttaagt

SEQ ID NO: 158764 - DNA, 15 bp, Homo sapiens
ccctgtacttaagtg

SEQ ID NO: 158765 - DNA, 15 bp, Homo sapiens
cctgtacttaagtgc

SEQ ID NO: 158766 - DNA, 15 bp, Homo sapiens
ctgtacttaagtgct

SEQ ID NO: 158767 - DNA, 15 bp, Homo sapiens
tgtacttaagtgctt

SEQ ID NO: 158768 - DNA, 15 bp, Homo sapiens
gtacttaagtgcttc

SEQ ID NO: 158769 - DNA, 15 bp, Homo sapiens
tacttaagtgcttca

SEQ ID NO: 158770 - DNA, 15 bp, Homo sapiens
acttaagtgcttcaa

SEQ ID NO: 158771 - DNA, 15 bp, Homo sapiens
cttaagtgcttcaat

SEQ ID NO: 158772 - DNA, 15 bp, Homo sapiens
ttaagtgcttcaata

SEQ ID NO: 158773 - DNA, 15 bp, Homo sapiens
taagtgcttcaatag

SEQ ID NO: 158774 - DNA, 15 bp, Homo sapiens
aagtgcttcaatagg

SEQ ID NO: 158775 - DNA, 15 bp, Homo sapiens
agtgcttcaataggc

SEQ ID NO: 158776 - DNA, 15 bp, Homo sapiens
gtgcttcaataggct

SEQ ID NO: 158777 - DNA, 15 bp, Homo sapiens
tgcttcaataggctc

SEQ ID NO: 158778 - DNA, 15 bp, Homo sapiens
gcttcaataggctct

SEQ ID NO: 158779 - DNA, 15 bp, Homo sapiens
cttcaataggctctc

SEQ ID NO: 158780 - DNA, 15 bp, Homo sapiens
ttcaataggctctca

SEQ ID NO: 158781 - DNA, 15 bp, Homo sapiens
tcaataggctctcat

SEQ ID NO: 158782 - DNA, 15 bp, Homo sapiens
caataggctctcatt

SEQ ID NO: 158783 - DNA, 15 bp, Homo sapiens
aataggctctcatta

SEQ ID NO: 158784 - DNA, 15 bp, Homo sapiens
ataggctctcattat

SEQ ID NO: 158785 - DNA, 15 bp, Homo sapiens
taggctctcattata

SEQ ID NO: 158786 - DNA, 15 bp, Homo sapiens
aggctctcattatat

SEQ ID NO: 158787 - DNA, 15 bp, Homo sapiens
ggctctcattatata

SEQ ID NO: 158788 - DNA, 15 bp, Homo sapiens
gctctcattatatat

SEQ ID NO: 158789 - DNA, 15 bp, Homo sapiens
ctctcattatatatg

SEQ ID NO: 158790 - DNA, 15 bp, Homo sapiens
tctcattatatatga

SEQ ID NO: 158791 - DNA, 15 bp, Homo sapiens
ctcattatatatgat

SEQ ID NO: 158792 - DNA, 15 bp, Homo sapiens
tcattatatatgatt

SEQ ID NO: 158793 - DNA, 15 bp, Homo sapiens
cattatatatgattt

SEQ ID NO: 158794 - DNA, 15 bp, Homo sapiens
attatatatgatttt

SEQ ID NO: 158795 - DNA, 15 bp, Homo sapiens
ttatatatgattttt

SEQ ID NO: 158796 - DNA, 15 bp, Homo sapiens
tatatatgattttta

SEQ ID NO: 158797 - DNA, 15 bp, Homo sapiens
atatatgatttttag

SEQ ID NO: 158798 - DNA, 15 bp, Homo sapiens
tatatgatttttagg

SEQ ID NO: 158799 - DNA, 15 bp, Homo sapiens
atatgatttttaggt

SEQ ID NO: 158800 - DNA, 15 bp, Homo sapiens
tatgatttttaggtt

SEQ ID NO: 158801 - DNA, 15 bp, Homo sapiens
atgatttttaggttt

SEQ ID NO: 158802 - DNA, 15 bp, Homo sapiens
tgatttttaggtttt

SEQ ID NO: 158803 - DNA, 15 bp, Homo sapiens
gatttttaggttttg

SEQ ID NO: 158804 - DNA, 15 bp, Homo sapiens
atttttaggttttgc

SEQ ID NO: 158805 - DNA, 15 bp, Homo sapiens
tttttaggttttgct

SEQ ID NO: 158806 - DNA, 15 bp, Homo sapiens
ttttaggttttgctt

SEQ ID NO: 158807 - DNA, 15 bp, Homo sapiens
tttaggttttgctta

SEQ ID NO: 158808 - DNA, 15 bp, Homo sapiens
ttaggttttgcttat

SEQ ID NO: 158809 - DNA, 15 bp, Homo sapiens
taggttttgcttatc

SEQ ID NO: 158810 - DNA, 15 bp, Homo sapiens
aggttttgcttatca

SEQ ID NO: 158811 - DNA, 15 bp, Homo sapiens
ggttttgcttatcag

SEQ ID NO: 158812 - DNA, 15 bp, Homo sapiens
gttttgcttatcagc

SEQ ID NO: 158813 - DNA, 15 bp, Homo sapiens
ttttgcttatcagct

SEQ ID NO: 158814 - DNA, 15 bp, Homo sapiens
tttgcttatcagctt

SEQ ID NO: 158815 - DNA, 15 bp, Homo sapiens
ttgcttatcagcttc

SEQ ID NO: 158816 - DNA, 15 bp, Homo sapiens
tgcttatcagcttct

SEQ ID NO: 158817 - DNA, 15 bp, Homo sapiens
gcttatcagcttctt

SEQ ID NO: 158818 - DNA, 15 bp, Homo sapiens
cttatcagcttcttc

SEQ ID NO: 158819 - DNA, 15 bp, Homo sapiens
ttatcagcttcttcg

SEQ ID NO: 158820 - DNA, 15 bp, Homo sapiens
tatcagcttcttcgc

SEQ ID NO: 158821 - DNA, 15 bp, Homo sapiens
atcagcttcttcgct

SEQ ID NO: 158822 - DNA, 15 bp, Homo sapiens
tcagcttcttcgctt

SEQ ID NO: 158823 - DNA, 15 bp, Homo sapiens
cagcttcttcgcttt

SEQ ID NO: 158824 - DNA, 15 bp, Homo sapiens
agcttcttcgctttt

SEQ ID NO: 158825 - DNA, 15 bp, Homo sapiens
gcttcttcgctttta

SEQ ID NO: 158826 - DNA, 15 bp, Homo sapiens
cttcttcgcttttat

SEQ ID NO: 158827 - DNA, 15 bp, Homo sapiens
ttcttcgcttttata

SEQ ID NO: 158828 - DNA, 15 bp, Homo sapiens
tcttcgcttttataa

SEQ ID NO: 158829 - DNA, 15 bp, Homo sapiens
cttcgcttttataat

SEQ ID NO: 158830 - DNA, 15 bp, Homo sapiens
ttcgcttttataatc

SEQ ID NO: 158831 - DNA, 15 bp, Homo sapiens
tcgcttttataatct

SEQ ID NO: 158832 - DNA, 15 bp, Homo sapiens
cgcttttataatctg

SEQ ID NO: 158833 - DNA, 15 bp, Homo sapiens
gcttttataatctga

SEQ ID NO: 158834 - DNA, 15 bp, Homo sapiens
cttttataatctgaa

SEQ ID NO: 158835 - DNA, 15 bp, Homo sapiens
ttttataatctgaaa

SEQ ID NO: 158836 - DNA, 15 bp, Homo sapiens
tttataatctgaaaa

SEQ ID NO: 158837 - DNA, 15 bp, Homo sapiens
ttataatctgaaaag

SEQ ID NO: 158838 - DNA, 15 bp, Homo sapiens
tataatctgaaaaga

SEQ ID NO: 158839 - DNA, 15 bp, Homo sapiens
ataatctgaaaagat

SEQ ID NO: 158840 - DNA, 15 bp, Homo sapiens
taatctgaaaagatg

SEQ ID NO: 158841 - DNA, 15 bp, Homo sapiens
aatctgaaaagatgg

SEQ ID NO: 158842 - DNA, 15 bp, Homo sapiens
atctgaaaagatggc

SEQ ID NO: 158843 - DNA, 15 bp, Homo sapiens
tctgaaaagatggca

SEQ ID NO: 158844 - DNA, 15 bp, Homo sapiens
ctgaaaagatggcat

SEQ ID NO: 158845 - DNA, 15 bp, Homo sapiens
tgaaaagatggcata

SEQ ID NO: 158846 - DNA, 15 bp, Homo sapiens
gaaaagatggcatat

SEQ ID NO: 158847 - DNA, 15 bp, Homo sapiens
aaaagatggcatatg

SEQ ID NO: 158848 - DNA, 15 bp, Homo sapiens
aaagatggcatatga

SEQ ID NO: 158849 - DNA, 15 bp, Homo sapiens
aagatggcatatgaa

SEQ ID NO: 158850 - DNA, 15 bp, Homo sapiens
agatggcatatgaat

SEQ ID NO: 158851 - DNA, 15 bp, Homo sapiens
gatggcatatgaatt

SEQ ID NO: 158852 - DNA, 15 bp, Homo sapiens
atggcatatgaattt

SEQ ID NO: 158853 - DNA, 15 bp, Homo sapiens
tggcatatgaatttt

SEQ ID NO: 158854 - DNA, 15 bp, Homo sapiens
ggcatatgaattttt

SEQ ID NO: 158855 - DNA, 15 bp, Homo sapiens
gcatatgaattttta

SEQ ID NO: 158856 - DNA, 15 bp, Homo sapiens
catatgaatttttat

SEQ ID NO: 158857 - DNA, 15 bp, Homo sapiens
atatgaatttttata

SEQ ID NO: 158858 - DNA, 15 bp, Homo sapiens
tatgaatttttataa

SEQ ID NO: 158859 - DNA, 15 bp, Homo sapiens
atgaatttttataaa

SEQ ID NO: 158860 - DNA, 15 bp, Homo sapiens
tgaatttttataaaa

SEQ ID NO: 158861 - DNA, 15 bp, Homo sapiens
gaatttttataaaaa

SEQ ID NO: 158862 - DNA, 15 bp, Homo sapiens
aatttttataaaaag

SEQ ID NO: 158863 - DNA, 15 bp, Homo sapiens
atttttataaaaagg

SEQ ID NO: 158864 - DNA, 15 bp, Homo sapiens
tttttataaaaaggg

SEQ ID NO: 158865 - DNA, 15 bp, Homo sapiens
ttttataaaaaggga

SEQ ID NO: 158866 - DNA, 15 bp, Homo sapiens
tttataaaaagggac

SEQ ID NO: 158867 - DNA, 15 bp, Homo sapiens
ttataaaaagggaca

SEQ ID NO: 158868 - DNA, 15 bp, Homo sapiens
tataaaaagggacac

SEQ ID NO: 158869 - DNA, 15 bp, Homo sapiens
ataaaaagggacact

SEQ ID NO: 158870 - DNA, 15 bp, Homo sapiens
taaaaagggacactt

SEQ ID NO: 158871 - DNA, 15 bp, Homo sapiens
aaaaagggacacttt

SEQ ID NO: 158872 - DNA, 15 bp, Homo sapiens
aaaagggacactttc

SEQ ID NO: 158873 - DNA, 15 bp, Homo sapiens
aaagggacactttct

SEQ ID NO: 158874 - DNA, 15 bp, Homo sapiens
aagggacactttctt

SEQ ID NO: 158875 - DNA, 15 bp, Homo sapiens
agggacactttcttc

SEQ ID NO: 158876 - DNA, 15 bp, Homo sapiens
gggacactttcttct

SEQ ID NO: 158877 - DNA, 15 bp, Homo sapiens
ggacactttcttctt

SEQ ID NO: 158878 - DNA, 15 bp, Homo sapiens
gacactttcttcttc

SEQ ID NO: 158879 - DNA, 15 bp, Homo sapiens
acactttcttcttct

SEQ ID NO: 158880 - DNA, 15 bp, Homo sapiens
cactttcttcttctc

SEQ ID NO: 158881 - DNA, 15 bp, Homo sapiens
actttcttcttctca

SEQ ID NO: 158882 - DNA, 15 bp, Homo sapiens
ctttcttcttctcaa

SEQ ID NO: 158883 - DNA, 15 bp, Homo sapiens
tttcttcttctcaaa

SEQ ID NO: 158884 - DNA, 15 bp, Homo sapiens
ttcttcttctcaaat

SEQ ID NO: 158885 - DNA, 15 bp, Homo sapiens
tcttcttctcaaatt

SEQ ID NO: 158886 - DNA, 15 bp, Homo sapiens
cttcttctcaaattg

SEQ ID NO: 158887 - DNA, 15 bp, Homo sapiens
ttcttctcaaattgt

SEQ ID NO: 158888 - DNA, 15 bp, Homo sapiens
tcttctcaaattgta

SEQ ID NO: 158889 - DNA, 15 bp, Homo sapiens
cttctcaaattgtat

SEQ ID NO: 158890 - DNA, 15 bp, Homo sapiens
ttctcaaattgtata

SEQ ID NO: 158891 - DNA, 15 bp, Homo sapiens
tctcaaattgtatat

SEQ ID NO: 158892 - DNA, 15 bp, Homo sapiens
ctcaaattgtatatt

SEQ ID NO: 158893 - DNA, 15 bp, Homo sapiens
tcaaattgtatattt

SEQ ID NO: 158894 - DNA, 15 bp, Homo sapiens
caaattgtatatttt

SEQ ID NO: 158895 - DNA, 15 bp, Homo sapiens
aaattgtatattttt

SEQ ID NO: 158896 - DNA, 15 bp, Homo sapiens
aattgtatattttta

SEQ ID NO: 158897 - DNA, 15 bp, Homo sapiens
attgtatatttttat

SEQ ID NO: 158898 - DNA, 15 bp, Homo sapiens
ttgtatatttttatt

SEQ ID NO: 158899 - DNA, 15 bp, Homo sapiens
tgtatatttttattg

SEQ ID NO: 158900 - DNA, 15 bp, Homo sapiens
gtatatttttattgt

SEQ ID NO: 158901 - DNA, 15 bp, Homo sapiens
tatatttttattgta

SEQ ID NO: 158902 - DNA, 15 bp, Homo sapiens
atatttttattgtac

SEQ ID NO: 158903 - DNA, 15 bp, Homo sapiens
tatttttattgtact

SEQ ID NO: 158904 - DNA, 15 bp, Homo sapiens
atttttattgtactt

SEQ ID NO: 158905 - DNA, 15 bp, Homo sapiens
tttttattgtacttt

SEQ ID NO: 158906 - DNA, 15 bp, Homo sapiens
ttttattgtactttc

SEQ ID NO: 158907 - DNA, 15 bp, Homo sapiens
tttattgtactttcc

SEQ ID NO: 158908 - DNA, 15 bp, Homo sapiens
ttattgtactttcct

SEQ ID NO: 158909 - DNA, 15 bp, Homo sapiens
tattgtactttcctt

SEQ ID NO: 158910 - DNA, 15 bp, Homo sapiens
attgtactttccttc

SEQ ID NO: 158911 - DNA, 15 bp, Homo sapiens
ttgtactttccttca

SEQ ID NO: 158912 - DNA, 15 bp, Homo sapiens
tgtactttccttcaa

SEQ ID NO: 158913 - DNA, 15 bp, Homo sapiens
gtactttccttcaaa

SEQ ID NO: 158914 - DNA, 15 bp, Homo sapiens
tactttccttcaaaa

SEQ ID NO: 158915 - DNA, 15 bp, Homo sapiens
actttccttcaaaac

SEQ ID NO: 158916 - DNA, 15 bp, Homo sapiens
ctttccttcaaaacc

SEQ ID NO: 158917 - DNA, 15 bp, Homo sapiens
tttccttcaaaaccc

SEQ ID NO: 158918 - DNA, 15 bp, Homo sapiens
ttccttcaaaacccc

SEQ ID NO: 158919 - DNA, 15 bp, Homo sapiens
tccttcaaaaccccc

SEQ ID NO: 158920 - DNA, 15 bp, Homo sapiens
ccttcaaaaccccct

SEQ ID NO: 158921 - DNA, 15 bp, Homo sapiens
cttcaaaaccccctt

SEQ ID NO: 158922 - DNA, 15 bp, Homo sapiens
ttcaaaacccccttt

SEQ ID NO: 158923 - DNA, 15 bp, Homo sapiens
tcaaaaccccctttt

SEQ ID NO: 158924 - DNA, 15 bp, Homo sapiens
caaaaccccctttta

SEQ ID NO: 158925 - DNA, 15 bp, Homo sapiens
aaaacccccttttaa

SEQ ID NO: 158926 - DNA, 15 bp, Homo sapiens
aaacccccttttaaa

SEQ ID NO: 158927 - DNA, 15 bp, Homo sapiens
aacccccttttaaaa

SEQ ID NO: 158928 - DNA, 15 bp, Homo sapiens
acccccttttaaaaa

SEQ ID NO: 158929 - DNA, 15 bp, Homo sapiens
cccccttttaaaaag

SEQ ID NO: 158930 - DNA, 15 bp, Homo sapiens
ccccttttaaaaagt

SEQ ID NO: 158931 - DNA, 15 bp, Homo sapiens
cccttttaaaaagta

SEQ ID NO: 158932 - DNA, 15 bp, Homo sapiens
ccttttaaaaagtaa

SEQ ID NO: 158933 - DNA, 15 bp, Homo sapiens
cttttaaaaagtaag

SEQ ID NO: 158934 - DNA, 15 bp, Homo sapiens
ttttaaaaagtaagc

SEQ ID NO: 158935 - DNA, 15 bp, Homo sapiens
tttaaaaagtaagca

SEQ ID NO: 158936 - DNA, 15 bp, Homo sapiens
ttaaaaagtaagcag

SEQ ID NO: 158937 - DNA, 15 bp, Homo sapiens
taaaaagtaagcagt

SEQ ID NO: 158938 - DNA, 15 bp, Homo sapiens
aaaaagtaagcagtg

SEQ ID NO: 158939 - DNA, 15 bp, Homo sapiens
aaaagtaagcagtgg

SEQ ID NO: 158940 - DNA, 15 bp, Homo sapiens
aaagtaagcagtgga

SEQ ID NO: 158941 - DNA, 15 bp, Homo sapiens
aagtaagcagtggat

SEQ ID NO: 158942 - DNA, 15 bp, Homo sapiens
agtaagcagtggata

SEQ ID NO: 158943 - DNA, 15 bp, Homo sapiens
gtaagcagtggataa

SEQ ID NO: 158944 - DNA, 15 bp, Homo sapiens
taagcagtggataaa

SEQ ID NO: 158945 - DNA, 15 bp, Homo sapiens
aagcagtggataaat

SEQ ID NO: 158946 - DNA, 15 bp, Homo sapiens
agcagtggataaata

SEQ ID NO: 158947 - DNA, 15 bp, Homo sapiens
gcagtggataaataa

SEQ ID NO: 158948 - DNA, 15 bp, Homo sapiens
cagtggataaataaa

SEQ ID NO: 158949 - DNA, 15 bp, Homo sapiens
agtggataaataaat

SEQ ID NO: 158950 - DNA, 15 bp, Homo sapiens
gtggataaataaatt

SEQ ID NO: 158951 - DNA, 15 bp, Homo sapiens
tggataaataaattc

SEQ ID NO: 158952 - DNA, 15 bp, Homo sapiens
ggataaataaattca

SEQ ID NO: 158953 - DNA, 15 bp, Homo sapiens
gataaataaattcag

SEQ ID NO: 158954 - DNA, 15 bp, Homo sapiens
ataaataaattcagt

SEQ ID NO: 158955 - DNA, 15 bp, Homo sapiens
taaataaattcagtg

SEQ ID NO: 158956 - DNA, 15 bp, Homo sapiens
aaataaattcagtga

SEQ ID NO: 158957 - DNA, 15 bp, Homo sapiens
aataaattcagtgaa

SEQ ID NO: 158958 - DNA, 15 bp, Homo sapiens
ataaattcagtgaag

SEQ ID NO: 158959 - DNA, 15 bp, Homo sapiens
taaattcagtgaagc

SEQ ID NO: 158960 - DNA, 15 bp, Homo sapiens
aaattcagtgaagca

SEQ ID NO: 158961 - DNA, 15 bp, Homo sapiens
aattcagtgaagcat

SEQ ID NO: 158962 - DNA, 15 bp, Homo sapiens
attcagtgaagcatc

SEQ ID NO: 158963 - DNA, 15 bp, Homo sapiens
ttcagtgaagcatcc

SEQ ID NO: 158964 - DNA, 15 bp, Homo sapiens
tcagtgaagcatcca

SEQ ID NO: 158965 - DNA, 15 bp, Homo sapiens
cagtgaagcatccat

SEQ ID NO: 158966 - DNA, 15 bp, Homo sapiens
agtgaagcatccata

SEQ ID NO: 158967 - DNA, 15 bp, Homo sapiens
gtgaagcatccatat

SEQ ID NO: 158968 - DNA, 15 bp, Homo sapiens
tgaagcatccatatg

SEQ ID NO: 158969 - DNA, 15 bp, Homo sapiens
gaagcatccatatga

SEQ ID NO: 158970 - DNA, 15 bp, Homo sapiens
aagcatccatatgac

SEQ ID NO: 158971 - DNA, 15 bp, Homo sapiens
agcatccatatgacc

SEQ ID NO: 158972 - DNA, 15 bp, Homo sapiens
gcatccatatgaccc

SEQ ID NO: 158973 - DNA, 15 bp, Homo sapiens
catccatatgaccct

SEQ ID NO: 158974 - DNA, 15 bp, Homo sapiens
atccatatgaccctt

SEQ ID NO: 158975 - DNA, 15 bp, Homo sapiens
tccatatgaccctta

SEQ ID NO: 158976 - DNA, 15 bp, Homo sapiens
ccatatgacccttaa

SEQ ID NO: 158977 - DNA, 15 bp, Homo sapiens
catatgacccttaag

SEQ ID NO: 158978 - DNA, 15 bp, Homo sapiens
atatgacccttaagt

SEQ ID NO: 158979 - DNA, 15 bp, Homo sapiens
tatgacccttaagtg

SEQ ID NO: 158980 - DNA, 15 bp, Homo sapiens
atgacccttaagtga

SEQ ID NO: 158981 - DNA, 15 bp, Homo sapiens
tgacccttaagtgag

SEQ ID NO: 158982 - DNA, 15 bp, Homo sapiens
gacccttaagtgagt

SEQ ID NO: 158983 - DNA, 15 bp, Homo sapiens
acccttaagtgagtg

SEQ ID NO: 158984 - DNA, 15 bp, Homo sapiens
cccttaagtgagtgt

SEQ ID NO: 158985 - DNA, 15 bp, Homo sapiens
ccttaagtgagtgta

SEQ ID NO: 158986 - DNA, 15 bp, Homo sapiens
cttaagtgagtgtag

SEQ ID NO: 158987 - DNA, 15 bp, Homo sapiens
ttaagtgagtgtagg

SEQ ID NO: 158988 - DNA, 15 bp, Homo sapiens
taagtgagtgtaggg

SEQ ID NO: 158989 - DNA, 15 bp, Homo sapiens
aagtgagtgtagggg

SEQ ID NO: 158990 - DNA, 15 bp, Homo sapiens
agtgagtgtagggga

SEQ ID NO: 158991 - DNA, 15 bp, Homo sapiens
gtgagtgtaggggaa

SEQ ID NO: 158992 - DNA, 15 bp, Homo sapiens
tgagtgtaggggaag

SEQ ID NO: 158993 - DNA, 15 bp, Homo sapiens
gagtgtaggggaagg

SEQ ID NO: 158994 - DNA, 15 bp, Homo sapiens
agtgtaggggaaggg

SEQ ID NO: 158995 - DNA, 15 bp, Homo sapiens
gtgtaggggaaggga

SEQ ID NO: 158996 - DNA, 15 bp, Homo sapiens
tgtaggggaagggag

SEQ ID NO: 158997 - DNA, 15 bp, Homo sapiens
gtaggggaagggagg

SEQ ID NO: 158998 - DNA, 15 bp, Homo sapiens
taggggaagggaggt

SEQ ID NO: 158999 - DNA, 15 bp, Homo sapiens
aggggaagggaggtc

SEQ ID NO: 159000 - DNA, 15 bp, Homo sapiens
ggggaagggaggtca

SEQ ID NO: 159001 - DNA, 15 bp, Homo sapiens
gggaagggaggtcac

SEQ ID NO: 159002 - DNA, 15 bp, Homo sapiens
ggaagggaggtcacc

SEQ ID NO: 159003 - DNA, 15 bp, Homo sapiens
gaagggaggtcacca

SEQ ID NO: 159004 - DNA, 15 bp, Homo sapiens
aagggaggtcaccag

SEQ ID NO: 159005 - DNA, 15 bp, Homo sapiens
agggaggtcaccaga

SEQ ID NO: 159006 - DNA, 15 bp, Homo sapiens
gggaggtcaccagat

SEQ ID NO: 159007 - DNA, 15 bp, Homo sapiens
ggaggtcaccagatc

SEQ ID NO: 159008 - DNA, 15 bp, Homo sapiens
gaggtcaccagatca

SEQ ID NO: 159009 - DNA, 15 bp, Homo sapiens
aggtcaccagatcac

SEQ ID NO: 159010 - DNA, 15 bp, Homo sapiens
ggtcaccagatcact

SEQ ID NO: 159011 - DNA, 15 bp, Homo sapiens
gtcaccagatcactg

SEQ ID NO: 159012 - DNA, 15 bp, Homo sapiens
tcaccagatcactgt

SEQ ID NO: 159013 - DNA, 15 bp, Homo sapiens
caccagatcactgtg

SEQ ID NO: 159014 - DNA, 15 bp, Homo sapiens
accagatcactgtga

SEQ ID NO: 159015 - DNA, 15 bp, Homo sapiens
ccagatcactgtgag

SEQ ID NO: 159016 - DNA, 15 bp, Homo sapiens
cagatcactgtgagt

SEQ ID NO: 159017 - DNA, 15 bp, Homo sapiens
agatcactgtgagtg

SEQ ID NO: 159018 - DNA, 15 bp, Homo sapiens
gatcactgtgagtga

SEQ ID NO: 159019 - DNA, 15 bp, Homo sapiens
atcactgtgagtgaa

SEQ ID NO: 159020 - DNA, 15 bp, Homo sapiens
tcactgtgagtgaag

SEQ ID NO: 159021 - DNA, 15 bp, Homo sapiens
cactgtgagtgaaga

SEQ ID NO: 159022 - DNA, 15 bp, Homo sapiens
actgtgagtgaagat

SEQ ID NO: 159023 - DNA, 15 bp, Homo sapiens
ctgtgagtgaagatg

SEQ ID NO: 159024 - DNA, 15 bp, Homo sapiens
tgtgagtgaagatgg

SEQ ID NO: 159025 - DNA, 15 bp, Homo sapiens
gtgagtgaagatggt

SEQ ID NO: 159026 - DNA, 15 bp, Homo sapiens
tgagtgaagatggtg

SEQ ID NO: 159027 - DNA, 15 bp, Homo sapiens
gagtgaagatggtgg

SEQ ID NO: 159028 - DNA, 15 bp, Homo sapiens
agtgaagatggtgga

SEQ ID NO: 159029 - DNA, 15 bp, Homo sapiens
gtgaagatggtggag

SEQ ID NO: 159030 - DNA, 15 bp, Homo sapiens
tgaagatggtggaga

SEQ ID NO: 159031 - DNA, 15 bp, Homo sapiens
gaagatggtggagag

SEQ ID NO: 159032 - DNA, 15 bp, Homo sapiens
aagatggtggagagg

SEQ ID NO: 159033 - DNA, 15 bp, Homo sapiens
agatggtggagaggt

SEQ ID NO: 159034 - DNA, 15 bp, Homo sapiens
gatggtggagaggtg

SEQ ID NO: 159035 - DNA, 15 bp, Homo sapiens
atggtggagaggtga

SEQ ID NO: 159036 - DNA, 15 bp, Homo sapiens
tggtggagaggtgag

SEQ ID NO: 159037 - DNA, 15 bp, Homo sapiens
ggtggagaggtgagg

SEQ ID NO: 159038 - DNA, 15 bp, Homo sapiens
gtggagaggtgagga

SEQ ID NO: 159039 - DNA, 15 bp, Homo sapiens
tggagaggtgaggat

SEQ ID NO: 159040 - DNA, 15 bp, Homo sapiens
ggagaggtgaggatc

SEQ ID NO: 159041 - DNA, 15 bp, Homo sapiens
gagaggtgaggatct

SEQ ID NO: 159042 - DNA, 15 bp, Homo sapiens
agaggtgaggatctt

SEQ ID NO: 159043 - DNA, 15 bp, Homo sapiens
gaggtgaggatctta

SEQ ID NO: 159044 - DNA, 15 bp, Homo sapiens
aggtgaggatcttat

SEQ ID NO: 159045 - DNA, 15 bp, Homo sapiens
ggtgaggatcttatg

SEQ ID NO: 159046 - DNA, 15 bp, Homo sapiens
gtgaggatcttatga

SEQ ID NO: 159047 - DNA, 15 bp, Homo sapiens
tgaggatcttatgag

SEQ ID NO: 159048 - DNA, 15 bp, Homo sapiens
gaggatcttatgagg

SEQ ID NO: 159049 - DNA, 15 bp, Homo sapiens
aggatcttatgaggc

SEQ ID NO: 159050 - DNA, 15 bp, Homo sapiens
ggatcttatgaggcc

SEQ ID NO: 159051 - DNA, 15 bp, Homo sapiens
gatcttatgaggccg

SEQ ID NO: 159052 - DNA, 15 bp, Homo sapiens
atcttatgaggccgt

SEQ ID NO: 159053 - DNA, 15 bp, Homo sapiens
tcttatgaggccgtg

SEQ ID NO: 159054 - DNA, 15 bp, Homo sapiens
cttatgaggccgtgc

SEQ ID NO: 159055 - DNA, 15 bp, Homo sapiens
ttatgaggccgtgct

SEQ ID NO: 159056 - DNA, 15 bp, Homo sapiens
tatgaggccgtgctc

SEQ ID NO: 159057 - DNA, 15 bp, Homo sapiens
atgaggccgtgctca

SEQ ID NO: 159058 - DNA, 15 bp, Homo sapiens
tgaggccgtgctcaa

SEQ ID NO: 159059 - DNA, 15 bp, Homo sapiens
gaggccgtgctcaag

SEQ ID NO: 159060 - DNA, 15 bp, Homo sapiens
aggccgtgctcaagg

SEQ ID NO: 159061 - DNA, 15 bp, Homo sapiens
ggccgtgctcaaggc

SEQ ID NO: 159062 - DNA, 15 bp, Homo sapiens
gccgtgctcaaggct

SEQ ID NO: 159063 - DNA, 15 bp, Homo sapiens
ccgtgctcaaggctg

SEQ ID NO: 159064 - DNA, 15 bp, Homo sapiens
cgtgctcaaggctgg

SEQ ID NO: 159065 - DNA, 15 bp, Homo sapiens
gtgctcaaggctggt

SEQ ID NO: 159066 - DNA, 15 bp, Homo sapiens
tgctcaaggctggta

SEQ ID NO: 159067 - DNA, 15 bp, Homo sapiens
gctcaaggctggtag

SEQ ID NO: 159068 - DNA, 15 bp, Homo sapiens
ctcaaggctggtaga

SEQ ID NO: 159069 - DNA, 15 bp, Homo sapiens
tcaaggctggtagag

SEQ ID NO: 159070 - DNA, 15 bp, Homo sapiens
caaggctggtagagg

SEQ ID NO: 159071 - DNA, 15 bp, Homo sapiens
aaggctggtagaggt

SEQ ID NO: 159072 - DNA, 15 bp, Homo sapiens
aggctggtagaggtg

SEQ ID NO: 159073 - DNA, 15 bp, Homo sapiens
ggctggtagaggtgg

SEQ ID NO: 159074 - DNA, 15 bp, Homo sapiens
gctggtagaggtggg

SEQ ID NO: 159075 - DNA, 15 bp, Homo sapiens
ctggtagaggtgggt

SEQ ID NO: 159076 - DNA, 15 bp, Homo sapiens
tggtagaggtgggtt

SEQ ID NO: 159077 - DNA, 15 bp, Homo sapiens
ggtagaggtgggtta

SEQ ID NO: 159078 - DNA, 15 bp, Homo sapiens
gtagaggtgggttag

SEQ ID NO: 159079 - DNA, 15 bp, Homo sapiens
tagaggtgggttagt

SEQ ID NO: 159080 - DNA, 15 bp, Homo sapiens
agaggtgggttagtg

SEQ ID NO: 159081 - DNA, 15 bp, Homo sapiens
gaggtgggttagtgt

SEQ ID NO: 159082 - DNA, 15 bp, Homo sapiens
aggtgggttagtgtt

SEQ ID NO: 159083 - DNA, 15 bp, Homo sapiens
ggtgggttagtgttt

SEQ ID NO: 159084 - DNA, 15 bp, Homo sapiens
gtgggttagtgtttc

SEQ ID NO: 159085 - DNA, 15 bp, Homo sapiens
tgggttagtgtttcc

SEQ ID NO: 159086 - DNA, 15 bp, Homo sapiens
gggttagtgtttcca

SEQ ID NO: 159087 - DNA, 15 bp, Homo sapiens
ggttagtgtttccag

SEQ ID NO: 159088 - DNA, 15 bp, Homo sapiens
gttagtgtttccagg

SEQ ID NO: 159089 - DNA, 15 bp, Homo sapiens
ttagtgtttccaggt

SEQ ID NO: 159090 - DNA, 15 bp, Homo sapiens
tagtgtttccaggtt

SEQ ID NO: 159091 - DNA, 15 bp, Homo sapiens
ttgggatgccgaggt

SEQ ID NO: 159092 - DNA, 15 bp, Homo sapiens
tgggatgccgaggtg

SEQ ID NO: 159093 - DNA, 15 bp, Homo sapiens
gggatgccgaggtgg

SEQ ID NO: 159094 - DNA, 15 bp, Homo sapiens
ggatgccgaggtgga

SEQ ID NO: 159095 - DNA, 15 bp, Homo sapiens
gatgccgaggtggac

SEQ ID NO: 159096 - DNA, 15 bp, Homo sapiens
atgccgaggtggact

SEQ ID NO: 159097 - DNA, 15 bp, Homo sapiens
tgccgaggtggactg

SEQ ID NO: 159098 - DNA, 15 bp, Homo sapiens
gccgaggtggactga

SEQ ID NO: 159099 - DNA, 15 bp, Homo sapiens
ccgaggtggactgat

SEQ ID NO: 159100 - DNA, 15 bp, Homo sapiens
cgaggtggactgatc

SEQ ID NO: 159101 - DNA, 15 bp, Homo sapiens
gaggtggactgatca

SEQ ID NO: 159102 - DNA, 15 bp, Homo sapiens
aggtggactgatcac

SEQ ID NO: 159103 - DNA, 15 bp, Homo sapiens
ggtggactgatcacc

SEQ ID NO: 159104 - DNA, 15 bp, Homo sapiens
gtggactgatcacct

SEQ ID NO: 159105 - DNA, 15 bp, Homo sapiens
tggactgatcaccta

SEQ ID NO: 159106 - DNA, 15 bp, Homo sapiens
ggactgatcacctaa

SEQ ID NO: 159107 - DNA, 15 bp, Homo sapiens
gactgatcacctaag

SEQ ID NO: 159108 - DNA, 15 bp, Homo sapiens
actgatcacctaagg

SEQ ID NO: 159109 - DNA, 15 bp, Homo sapiens
ctgatcacctaaggt

SEQ ID NO: 159110 - DNA, 15 bp, Homo sapiens
tgatcacctaaggtc

SEQ ID NO: 159111 - DNA, 15 bp, Homo sapiens
gatcacctaaggtca

SEQ ID NO: 159112 - DNA, 15 bp, Homo sapiens
atcacctaaggtcag

SEQ ID NO: 159113 - DNA, 15 bp, Homo sapiens
tcacctaaggtcagg

SEQ ID NO: 159114 - DNA, 15 bp, Homo sapiens
cacctaaggtcagga

SEQ ID NO: 159115 - DNA, 15 bp, Homo sapiens
acctaaggtcaggag

SEQ ID NO: 159116 - DNA, 15 bp, Homo sapiens
cctaaggtcaggagt

SEQ ID NO: 159117 - DNA, 15 bp, Homo sapiens
ctaaggtcaggagtt

SEQ ID NO: 159118 - DNA, 15 bp, Homo sapiens
taaggtcaggagttc

SEQ ID NO: 159119 - DNA, 15 bp, Homo sapiens
aaggtcaggagttcg

SEQ ID NO: 159120 - DNA, 15 bp, Homo sapiens
ggagttcgaaaccag

SEQ ID NO: 159121 - DNA, 15 bp, Homo sapiens
gagttcgaaaccagc

SEQ ID NO: 159122 - DNA, 15 bp, Homo sapiens
agttcgaaaccagct

SEQ ID NO: 159123 - DNA, 15 bp, Homo sapiens
gttcgaaaccagctt

SEQ ID NO: 159124 - DNA, 15 bp, Homo sapiens
ttcgaaaccagcttg

SEQ ID NO: 159125 - DNA, 15 bp, Homo sapiens
tcgaaaccagcttgg

SEQ ID NO: 159126 - DNA, 15 bp, Homo sapiens
cgaaaccagcttggc

SEQ ID NO: 159127 - DNA, 15 bp, Homo sapiens
gaaaccagcttggcc

SEQ ID NO: 159128 - DNA, 15 bp, Homo sapiens
aaaccagcttggcca

SEQ ID NO: 159129 - DNA, 15 bp, Homo sapiens
aaccagcttggccaa

SEQ ID NO: 159130 - DNA, 15 bp, Homo sapiens
accagcttggccaat

SEQ ID NO: 159131 - DNA, 15 bp, Homo sapiens
ccagcttggccaatg

SEQ ID NO: 159132 - DNA, 15 bp, Homo sapiens
cagcttggccaatgt

SEQ ID NO: 159133 - DNA, 15 bp, Homo sapiens
agcttggccaatgtg

SEQ ID NO: 159134 - DNA, 15 bp, Homo sapiens
gcttggccaatgtgg

SEQ ID NO: 159135 - DNA, 15 bp, Homo sapiens
cttggccaatgtggc

SEQ ID NO: 159136 - DNA, 15 bp, Homo sapiens
ttggccaatgtggcg

SEQ ID NO: 159137 - DNA, 15 bp, Homo sapiens
tggccaatgtggcga

SEQ ID NO: 159138 - DNA, 15 bp, Homo sapiens
ggccaatgtggcgaa

SEQ ID NO: 159139 - DNA, 15 bp, Homo sapiens
gccaatgtggcgaaa

SEQ ID NO: 159140 - DNA, 15 bp, Homo sapiens
ccaatgtggcgaaac

SEQ ID NO: 159141 - DNA, 15 bp, Homo sapiens
caatgtggcgaaacc

SEQ ID NO: 159142 - DNA, 15 bp, Homo sapiens
aatgtggcgaaaccc

SEQ ID NO: 159143 - DNA, 15 bp, Homo sapiens
atgtggcgaaaccct

SEQ ID NO: 159144 - DNA, 15 bp, Homo sapiens
tgtggcgaaaccctg

SEQ ID NO: 159145 - DNA, 15 bp, Homo sapiens
gtggcgaaaccctgt

SEQ ID NO: 159146 - DNA, 15 bp, Homo sapiens
aaccctgtctctact

SEQ ID NO: 159147 - DNA, 15 bp, Homo sapiens
accctgtctctacta

SEQ ID NO: 159148 - DNA, 15 bp, Homo sapiens
ccctgtctctactaa

SEQ ID NO: 159149 - DNA, 15 bp, Homo sapiens
tctctactaaaaatt

SEQ ID NO: 159150 - DNA, 15 bp, Homo sapiens
ctctactaaaaattc

SEQ ID NO: 159151 - DNA, 15 bp, Homo sapiens
tctactaaaaattca

SEQ ID NO: 159152 - DNA, 15 bp, Homo sapiens
ctactaaaaattcaa

SEQ ID NO: 159153 - DNA, 15 bp, Homo sapiens
tactaaaaattcaaa

SEQ ID NO: 159154 - DNA, 15 bp, Homo sapiens
actaaaaattcaaaa

SEQ ID NO: 159155 - DNA, 15 bp, Homo sapiens
ctaaaaattcaaaaa

SEQ ID NO: 159156 - DNA, 15 bp, Homo sapiens
taaaaattcaaaaat

SEQ ID NO: 159157 - DNA, 15 bp, Homo sapiens
aaaaattcaaaaatt

SEQ ID NO: 159158 - DNA, 15 bp, Homo sapiens
aaaattcaaaaatta

SEQ ID NO: 159159 - DNA, 15 bp, Homo sapiens
aaattcaaaaattag

SEQ ID NO: 159160 - DNA, 15 bp, Homo sapiens
aattcaaaaattagc

SEQ ID NO: 159161 - DNA, 15 bp, Homo sapiens
attcaaaaattagcc

SEQ ID NO: 159162 - DNA, 15 bp, Homo sapiens
ttcaaaaattagcca

SEQ ID NO: 159163 - DNA, 15 bp, Homo sapiens
tcaaaaattagccag

SEQ ID NO: 159164 - DNA, 15 bp, Homo sapiens
aaaattagccaggca

SEQ ID NO: 159165 - DNA, 15 bp, Homo sapiens
aaattagccaggcat

SEQ ID NO: 159166 - DNA, 15 bp, Homo sapiens
ccaggcatggtggca

SEQ ID NO: 159167 - DNA, 15 bp, Homo sapiens
caggcatggtggcac

SEQ ID NO: 159168 - DNA, 15 bp, Homo sapiens
aggcatggtggcaca

SEQ ID NO: 159169 - DNA, 15 bp, Homo sapiens
ggcatggtggcacat

SEQ ID NO: 159170 - DNA, 15 bp, Homo sapiens
gcatggtggcacatg

SEQ ID NO: 159171 - DNA, 15 bp, Homo sapiens
catggtggcacatgc

SEQ ID NO: 159172 - DNA, 15 bp, Homo sapiens
atggtggcacatgcc

SEQ ID NO: 159173 - DNA, 15 bp, Homo sapiens
ggcacatgcctgtaa

SEQ ID NO: 159174 - DNA, 15 bp, Homo sapiens
gcacatgcctgtaat

SEQ ID NO: 159175 - DNA, 15 bp, Homo sapiens
cacatgcctgtaatc

SEQ ID NO: 159176 - DNA, 15 bp, Homo sapiens
acatgcctgtaatcc

SEQ ID NO: 159177 - DNA, 15 bp, Homo sapiens
cctgtaatcccagtt

SEQ ID NO: 159178 - DNA, 15 bp, Homo sapiens
ctgtaatcccagtta

SEQ ID NO: 159179 - DNA, 15 bp, Homo sapiens
tgtaatcccagttac

SEQ ID NO: 159180 - DNA, 15 bp, Homo sapiens
gtaatcccagttact

SEQ ID NO: 159181 - DNA, 15 bp, Homo sapiens
taatcccagttactt

SEQ ID NO: 159182 - DNA, 15 bp, Homo sapiens
aatcccagttacttg

SEQ ID NO: 159183 - DNA, 15 bp, Homo sapiens
atcccagttacttgg

SEQ ID NO: 159184 - DNA, 15 bp, Homo sapiens
tcccagttacttggg

SEQ ID NO: 159185 - DNA, 15 bp, Homo sapiens
cccagttacttggga

SEQ ID NO: 159186 - DNA, 15 bp, Homo sapiens
ccagttacttgggag

SEQ ID NO: 159187 - DNA, 15 bp, Homo sapiens
cagttacttgggagg

SEQ ID NO: 159188 - DNA, 15 bp, Homo sapiens
agttacttgggaggc

SEQ ID NO: 159189 - DNA, 15 bp, Homo sapiens
gttacttgggaggct

SEQ ID NO: 159190 - DNA, 15 bp, Homo sapiens
ttacttgggaggctg

SEQ ID NO: 159191 - DNA, 15 bp, Homo sapiens
acttgggaggctgaa

SEQ ID NO: 159192 - DNA, 15 bp, Homo sapiens
cttgggaggctgaag

SEQ ID NO: 159193 - DNA, 15 bp, Homo sapiens
ttgggaggctgaagc

SEQ ID NO: 159194 - DNA, 15 bp, Homo sapiens
tgggaggctgaagca

SEQ ID NO: 159195 - DNA, 15 bp, Homo sapiens
gggaggctgaagcag

SEQ ID NO: 159196 - DNA, 15 bp, Homo sapiens
ggaggctgaagcagg

SEQ ID NO: 159197 - DNA, 15 bp, Homo sapiens
gaggctgaagcagga

SEQ ID NO: 159198 - DNA, 15 bp, Homo sapiens
aggctgaagcaggag

SEQ ID NO: 159199 - DNA, 15 bp, Homo sapiens
ggctgaagcaggaga

SEQ ID NO: 159200 - DNA, 15 bp, Homo sapiens
gctgaagcaggagaa

SEQ ID NO: 159201 - DNA, 15 bp, Homo sapiens
ctgaagcaggagaat

SEQ ID NO: 159202 - DNA, 15 bp, Homo sapiens
tgaagcaggagaatt

SEQ ID NO: 159203 - DNA, 15 bp, Homo sapiens
gaagcaggagaattg

SEQ ID NO: 159204 - DNA, 15 bp, Homo sapiens
aagcaggagaattgc

SEQ ID NO: 159205 - DNA, 15 bp, Homo sapiens
agcaggagaattgct

SEQ ID NO: 159206 - DNA, 15 bp, Homo sapiens
tgggaggtggaggtc

SEQ ID NO: 159207 - DNA, 15 bp, Homo sapiens
gggaggtggaggtcg

SEQ ID NO: 159208 - DNA, 15 bp, Homo sapiens
ggaggtggaggtcgc

SEQ ID NO: 159209 - DNA, 15 bp, Homo sapiens
gaggtggaggtcgca

SEQ ID NO: 159210 - DNA, 15 bp, Homo sapiens
aggtggaggtcgcag

SEQ ID NO: 159211 - DNA, 15 bp, Homo sapiens
ggtggaggtcgcagg

SEQ ID NO: 159212 - DNA, 15 bp, Homo sapiens
gtggaggtcgcaggg

SEQ ID NO: 159213 - DNA, 15 bp, Homo sapiens
tggaggtcgcaggga

SEQ ID NO: 159214 - DNA, 15 bp, Homo sapiens
ggaggtcgcagggag

SEQ ID NO: 159215 - DNA, 15 bp, Homo sapiens
gaggtcgcagggagc

SEQ ID NO: 159216 - DNA, 15 bp, Homo sapiens
aggtcgcagggagcc

SEQ ID NO: 159217 - DNA, 15 bp, Homo sapiens
ggtcgcagggagcca

SEQ ID NO: 159218 - DNA, 15 bp, Homo sapiens
gtcgcagggagccaa

SEQ ID NO: 159219 - DNA, 15 bp, Homo sapiens
tcgcagggagccaaa

SEQ ID NO: 159220 - DNA, 15 bp, Homo sapiens
cgcagggagccaaaa

SEQ ID NO: 159221 - DNA, 15 bp, Homo sapiens
gcagggagccaaaat

SEQ ID NO: 159222 - DNA, 15 bp, Homo sapiens
cagggagccaaaatt

SEQ ID NO: 159223 - DNA, 15 bp, Homo sapiens
agggagccaaaattg

SEQ ID NO: 159224 - DNA, 15 bp, Homo sapiens
gggagccaaaattgc

SEQ ID NO: 159225 - DNA, 15 bp, Homo sapiens
ggagccaaaattgcg

SEQ ID NO: 159226 - DNA, 15 bp, Homo sapiens
gagccaaaattgcgc

SEQ ID NO: 159227 - DNA, 15 bp, Homo sapiens
agccaaaattgcgcc

SEQ ID NO: 159228 - DNA, 15 bp, Homo sapiens
gccaaaattgcgcca

SEQ ID NO: 159229 - DNA, 15 bp, Homo sapiens
ccaaaattgcgccac

SEQ ID NO: 159230 - DNA, 15 bp, Homo sapiens
caaaattgcgccact

SEQ ID NO: 159231 - DNA, 15 bp, Homo sapiens
aaaattgcgccactg

SEQ ID NO: 159232 - DNA, 15 bp, Homo sapiens
aaattgcgccactgt

SEQ ID NO: 159233 - DNA, 15 bp, Homo sapiens
aattgcgccactgta

SEQ ID NO: 159234 - DNA, 15 bp, Homo sapiens
attgcgccactgtac

SEQ ID NO: 159235 - DNA, 15 bp, Homo sapiens
ttgcgccactgtact

SEQ ID NO: 159236 - DNA, 15 bp, Homo sapiens
tgcgccactgtactc

SEQ ID NO: 159237 - DNA, 15 bp, Homo sapiens
gcgccactgtactcc

SEQ ID NO: 159238 - DNA, 15 bp, Homo sapiens
cgccactgtactcca

SEQ ID NO: 159239 - DNA, 15 bp, Homo sapiens
cactgtactccagcc

SEQ ID NO: 159240 - DNA, 15 bp, Homo sapiens
tgtactccagcctga

SEQ ID NO: 159241 - DNA, 15 bp, Homo sapiens
gtactccagcctgag

SEQ ID NO: 159242 - DNA, 15 bp, Homo sapiens
tactccagcctgagc

SEQ ID NO: 159243 - DNA, 15 bp, Homo sapiens
actccagcctgagca

SEQ ID NO: 159244 - DNA, 15 bp, Homo sapiens
ctccagcctgagcaa

SEQ ID NO: 159245 - DNA, 15 bp, Homo sapiens
tccagcctgagcaac

SEQ ID NO: 159246 - DNA, 15 bp, Homo sapiens
ccagcctgagcaaca

SEQ ID NO: 159247 - DNA, 15 bp, Homo sapiens
cagcctgagcaacac

SEQ ID NO: 159248 - DNA, 15 bp, Homo sapiens
agcctgagcaacaca

SEQ ID NO: 159249 - DNA, 15 bp, Homo sapiens
gcctgagcaacacag

SEQ ID NO: 159250 - DNA, 15 bp, Homo sapiens
cctgagcaacacagc

SEQ ID NO: 159251 - DNA, 15 bp, Homo sapiens
ctgagcaacacagca

SEQ ID NO: 159252 - DNA, 15 bp, Homo sapiens
tgagcaacacagcaa

SEQ ID NO: 159253 - DNA, 15 bp, Homo sapiens
gagcaacacagcaaa

SEQ ID NO: 159254 - DNA, 15 bp, Homo sapiens
agcaacacagcaaaa

SEQ ID NO: 159255 - DNA, 15 bp, Homo sapiens
gcaacacagcaaaac

SEQ ID NO: 159256 - DNA, 15 bp, Homo sapiens
caacacagcaaaact

SEQ ID NO: 159257 - DNA, 15 bp, Homo sapiens
aacacagcaaaactc

SEQ ID NO: 159258 - DNA, 15 bp, Homo sapiens
acacagcaaaactcc

SEQ ID NO: 159259 - DNA, 15 bp, Homo sapiens
cacagcaaaactcca

SEQ ID NO: 159260 - DNA, 15 bp, Homo sapiens
acagcaaaactccat

SEQ ID NO: 159261 - DNA, 15 bp, Homo sapiens
cagcaaaactccata

SEQ ID NO: 159262 - DNA, 15 bp, Homo sapiens
agcaaaactccatat

SEQ ID NO: 159263 - DNA, 15 bp, Homo sapiens
gcaaaactccatatc

SEQ ID NO: 159264 - DNA, 15 bp, Homo sapiens
caaaactccatatca

SEQ ID NO: 159265 - DNA, 15 bp, Homo sapiens
aaaactccatatcaa

SEQ ID NO: 159266 - DNA, 15 bp, Homo sapiens
aaactccatatcaaa

SEQ ID NO: 159267 - DNA, 15 bp, Homo sapiens
aactccatatcaaaa

SEQ ID NO: 159268 - DNA, 15 bp, Homo sapiens
actccatatcaaaaa

SEQ ID NO: 159269 - DNA, 15 bp, Homo sapiens
ctccatatcaaaaaa

SEQ ID NO: 159270 - DNA, 15 bp, Homo sapiens
tccatatcaaaaaat

SEQ ID NO: 159271 - DNA, 15 bp, Homo sapiens
ccatatcaaaaaata

SEQ ID NO: 159272 - DNA, 15 bp, Homo sapiens
catatcaaaaaataa

SEQ ID NO: 159273 - DNA, 15 bp, Homo sapiens
atatcaaaaaataaa

SEQ ID NO: 159274 - DNA, 15 bp, Homo sapiens
tatcaaaaaataaaa

SEQ ID NO: 159275 - DNA, 15 bp, Homo sapiens
atcaaaaaataaaat

SEQ ID NO: 159276 - DNA, 15 bp, Homo sapiens
tcaaaaaataaaatg

SEQ ID NO: 159277 - DNA, 15 bp, Homo sapiens
caaaaaataaaatga

SEQ ID NO: 159278 - DNA, 15 bp, Homo sapiens
aaaaaataaaatgaa

SEQ ID NO: 159279 - DNA, 15 bp, Homo sapiens
aaaaataaaatgaat

SEQ ID NO: 159280 - DNA, 15 bp, Homo sapiens
aaaataaaatgaata

SEQ ID NO: 159281 - DNA, 15 bp, Homo sapiens
aaataaaatgaataa

SEQ ID NO: 159282 - DNA, 15 bp, Homo sapiens
aataaaatgaataaa

SEQ ID NO: 159283 - DNA, 15 bp, Homo sapiens
ataaaatgaataaaa

SEQ ID NO: 159284 - DNA, 15 bp, Homo sapiens
taaaatgaataaaat

SEQ ID NO: 159285 - DNA, 15 bp, Homo sapiens
aaaatgaataaaata

SEQ ID NO: 159286 - DNA, 15 bp, Homo sapiens
aaatgaataaaataa

SEQ ID NO: 159287 - DNA, 15 bp, Homo sapiens
aatgaataaaataac

SEQ ID NO: 159288 - DNA, 15 bp, Homo sapiens
atgaataaaataaca

SEQ ID NO: 159289 - DNA, 15 bp, Homo sapiens
tgaataaaataacag

SEQ ID NO: 159290 - DNA, 15 bp, Homo sapiens
gaataaaataacagc

SEQ ID NO: 159291 - DNA, 15 bp, Homo sapiens
aataaaataacagct

SEQ ID NO: 159292 - DNA, 15 bp, Homo sapiens
ataaaataacagcta

SEQ ID NO: 159293 - DNA, 15 bp, Homo sapiens
taaaataacagctaa

SEQ ID NO: 159294 - DNA, 15 bp, Homo sapiens
aaaataacagctaat

SEQ ID NO: 159295 - DNA, 15 bp, Homo sapiens
aaataacagctaatc

SEQ ID NO: 159296 - DNA, 15 bp, Homo sapiens
aataacagctaatct

SEQ ID NO: 159297 - DNA, 15 bp, Homo sapiens
ataacagctaatcta

SEQ ID NO: 159298 - DNA, 15 bp, Homo sapiens
taacagctaatctag

SEQ ID NO: 159299 - DNA, 15 bp, Homo sapiens
aacagctaatctagt

SEQ ID NO: 159300 - DNA, 15 bp, Homo sapiens
acagctaatctagtc

SEQ ID NO: 159301 - DNA, 15 bp, Homo sapiens
cagctaatctagtca

SEQ ID NO: 159302 - DNA, 15 bp, Homo sapiens
agctaatctagtcat

SEQ ID NO: 159303 - DNA, 15 bp, Homo sapiens
gctaatctagtcatc

SEQ ID NO: 159304 - DNA, 15 bp, Homo sapiens
ctaatctagtcatca

SEQ ID NO: 159305 - DNA, 15 bp, Homo sapiens
taatctagtcatcag

SEQ ID NO: 159306 - DNA, 15 bp, Homo sapiens
aatctagtcatcagt

SEQ ID NO: 159307 - DNA, 15 bp, Homo sapiens
atctagtcatcagta

SEQ ID NO: 159308 - DNA, 15 bp, Homo sapiens
tctagtcatcagtat

SEQ ID NO: 159309 - DNA, 15 bp, Homo sapiens
ctagtcatcagtata

SEQ ID NO: 159310 - DNA, 15 bp, Homo sapiens
tagtcatcagtataa

SEQ ID NO: 159311 - DNA, 15 bp, Homo sapiens
agtcatcagtataac

SEQ ID NO: 159312 - DNA, 15 bp, Homo sapiens
gtcatcagtataact

SEQ ID NO: 159313 - DNA, 15 bp, Homo sapiens
tcatcagtataactc

SEQ ID NO: 159314 - DNA, 15 bp, Homo sapiens
catcagtataactcc

SEQ ID NO: 159315 - DNA, 15 bp, Homo sapiens
atcagtataactcca

SEQ ID NO: 159316 - DNA, 15 bp, Homo sapiens
tcagtataactccag

SEQ ID NO: 159317 - DNA, 15 bp, Homo sapiens
cagtataactccagt

SEQ ID NO: 159318 - DNA, 15 bp, Homo sapiens
agtataactccagtg

SEQ ID NO: 159319 - DNA, 15 bp, Homo sapiens
gtataactccagtga

SEQ ID NO: 159320 - DNA, 15 bp, Homo sapiens
tataactccagtgaa

SEQ ID NO: 159321 - DNA, 15 bp, Homo sapiens
ataactccagtgaac

SEQ ID NO: 159322 - DNA, 15 bp, Homo sapiens
taactccagtgaaca

SEQ ID NO: 159323 - DNA, 15 bp, Homo sapiens
aactccagtgaacag

SEQ ID NO: 159324 - DNA, 15 bp, Homo sapiens
actccagtgaacaga

SEQ ID NO: 159325 - DNA, 15 bp, Homo sapiens
ctccagtgaacagaa

SEQ ID NO: 159326 - DNA, 15 bp, Homo sapiens
tccagtgaacagaag

SEQ ID NO: 159327 - DNA, 15 bp, Homo sapiens
ccagtgaacagaaga

SEQ ID NO: 159328 - DNA, 15 bp, Homo sapiens
cagtgaacagaagat

SEQ ID NO: 159329 - DNA, 15 bp, Homo sapiens
agtgaacagaagatt

SEQ ID NO: 159330 - DNA, 15 bp, Homo sapiens
gtgaacagaagattt

SEQ ID NO: 159331 - DNA, 15 bp, Homo sapiens
tgaacagaagattta

SEQ ID NO: 159332 - DNA, 15 bp, Homo sapiens
gaacagaagatttat

SEQ ID NO: 159333 - DNA, 15 bp, Homo sapiens
aacagaagatttatt

SEQ ID NO: 159334 - DNA, 15 bp, Homo sapiens
acagaagatttatta

SEQ ID NO: 159335 - DNA, 15 bp, Homo sapiens
cagaagatttattag

SEQ ID NO: 159336 - DNA, 15 bp, Homo sapiens
agaagatttattagg

SEQ ID NO: 159337 - DNA, 15 bp, Homo sapiens
gaagatttattaggc

SEQ ID NO: 159338 - DNA, 15 bp, Homo sapiens
aagatttattaggca

SEQ ID NO: 159339 - DNA, 15 bp, Homo sapiens
agatttattaggcat

SEQ ID NO: 159340 - DNA, 15 bp, Homo sapiens
gatttattaggcata

SEQ ID NO: 159341 - DNA, 15 bp, Homo sapiens
atttattaggcatag

SEQ ID NO: 159342 - DNA, 15 bp, Homo sapiens
tttattaggcatagt

SEQ ID NO: 159343 - DNA, 15 bp, Homo sapiens
ttattaggcatagtg

SEQ ID NO: 159344 - DNA, 15 bp, Homo sapiens
tattaggcatagtga

SEQ ID NO: 159345 - DNA, 15 bp, Homo sapiens
attaggcatagtgaa

SEQ ID NO: 159346 - DNA, 15 bp, Homo sapiens
ttaggcatagtgaat

SEQ ID NO: 159347 - DNA, 15 bp, Homo sapiens
taggcatagtgaatg

SEQ ID NO: 159348 - DNA, 15 bp, Homo sapiens
aggcatagtgaatga

SEQ ID NO: 159349 - DNA, 15 bp, Homo sapiens
ggcatagtgaatgat

SEQ ID NO: 159350 - DNA, 15 bp, Homo sapiens
gcatagtgaatgatg

SEQ ID NO: 159351 - DNA, 15 bp, Homo sapiens
catagtgaatgatgg

SEQ ID NO: 159352 - DNA, 15 bp, Homo sapiens
atagtgaatgatggt

SEQ ID NO: 159353 - DNA, 15 bp, Homo sapiens
tagtgaatgatggtg

SEQ ID NO: 159354 - DNA, 15 bp, Homo sapiens
agtgaatgatggtgc

SEQ ID NO: 159355 - DNA, 15 bp, Homo sapiens
gtgaatgatggtgct

SEQ ID NO: 159356 - DNA, 15 bp, Homo sapiens
tgaatgatggtgctt

SEQ ID NO: 159357 - DNA, 15 bp, Homo sapiens
gaatgatggtgcttc

SEQ ID NO: 159358 - DNA, 15 bp, Homo sapiens
aatgatggtgcttcc

SEQ ID NO: 159359 - DNA, 15 bp, Homo sapiens
atgatggtgcttcct

SEQ ID NO: 159360 - DNA, 15 bp, Homo sapiens
tgatggtgcttccta

SEQ ID NO: 159361 - DNA, 15 bp, Homo sapiens
gatggtgcttcctaa

SEQ ID NO: 159362 - DNA, 15 bp, Homo sapiens
atggtgcttcctaaa

SEQ ID NO: 159363 - DNA, 15 bp, Homo sapiens
tggtgcttcctaaaa

SEQ ID NO: 159364 - DNA, 15 bp, Homo sapiens
ggtgcttcctaaaaa

SEQ ID NO: 159365 - DNA, 15 bp, Homo sapiens
gtgcttcctaaaaat

SEQ ID NO: 159366 - DNA, 15 bp, Homo sapiens
tgcttcctaaaaatc

SEQ ID NO: 159367 - DNA, 15 bp, Homo sapiens
gcttcctaaaaatct

SEQ ID NO: 159368 - DNA, 15 bp, Homo sapiens
cttcctaaaaatctc

SEQ ID NO: 159369 - DNA, 15 bp, Homo sapiens
ttcctaaaaatctct

SEQ ID NO: 159370 - DNA, 15 bp, Homo sapiens
tcctaaaaatctctt

SEQ ID NO: 159371 - DNA, 15 bp, Homo sapiens
cctaaaaatctcttg

SEQ ID NO: 159372 - DNA, 15 bp, Homo sapiens
ctaaaaatctcttga

SEQ ID NO: 159373 - DNA, 15 bp, Homo sapiens
taaaaatctcttgac

SEQ ID NO: 159374 - DNA, 15 bp, Homo sapiens
aaaaatctcttgact

SEQ ID NO: 159375 - DNA, 15 bp, Homo sapiens
aaaatctcttgacta

SEQ ID NO: 159376 - DNA, 15 bp, Homo sapiens
aaatctcttgactac

SEQ ID NO: 159377 - DNA, 15 bp, Homo sapiens
aatctcttgactaca

SEQ ID NO: 159378 - DNA, 15 bp, Homo sapiens
atctcttgactacaa

SEQ ID NO: 159379 - DNA, 15 bp, Homo sapiens
tctcttgactacaaa

SEQ ID NO: 159380 - DNA, 15 bp, Homo sapiens
ctcttgactacaaag

SEQ ID NO: 159381 - DNA, 15 bp, Homo sapiens
tcttgactacaaaga

SEQ ID NO: 159382 - DNA, 15 bp, Homo sapiens
cttgactacaaagaa

SEQ ID NO: 159383 - DNA, 15 bp, Homo sapiens
ttgactacaaagaat

SEQ ID NO: 159384 - DNA, 15 bp, Homo sapiens
tgactacaaagaatc

SEQ ID NO: 159385 - DNA, 15 bp, Homo sapiens
gactacaaagaatct

SEQ ID NO: 159386 - DNA, 15 bp, Homo sapiens
actacaaagaatctc

SEQ ID NO: 159387 - DNA, 15 bp, Homo sapiens
ctacaaagaatctca

SEQ ID NO: 159388 - DNA, 15 bp, Homo sapiens
tacaaagaatctcat

SEQ ID NO: 159389 - DNA, 15 bp, Homo sapiens
acaaagaatctcatt

SEQ ID NO: 159390 - DNA, 15 bp, Homo sapiens
caaagaatctcattt

SEQ ID NO: 159391 - DNA, 15 bp, Homo sapiens
aaagaatctcatttc

SEQ ID NO: 159392 - DNA, 15 bp, Homo sapiens
aagaatctcatttca

SEQ ID NO: 159393 - DNA, 15 bp, Homo sapiens
agaatctcatttcaa

SEQ ID NO: 159394 - DNA, 15 bp, Homo sapiens
gaatctcatttcaat

SEQ ID NO: 159395 - DNA, 15 bp, Homo sapiens
aatctcatttcaatg

SEQ ID NO: 159396 - DNA, 15 bp, Homo sapiens
atctcatttcaatgt

SEQ ID NO: 159397 - DNA, 15 bp, Homo sapiens
tctcatttcaatgtt

SEQ ID NO: 159398 - DNA, 15 bp, Homo sapiens
ctcatttcaatgttt

SEQ ID NO: 159399 - DNA, 15 bp, Homo sapiens
tcatttcaatgttta

SEQ ID NO: 159400 - DNA, 15 bp, Homo sapiens
catttcaatgtttat

SEQ ID NO: 159401 - DNA, 15 bp, Homo sapiens
atttcaatgtttatt

SEQ ID NO: 159402 - DNA, 15 bp, Homo sapiens
tttcaatgtttattg

SEQ ID NO: 159403 - DNA, 15 bp, Homo sapiens
ttcaatgtttattgt

SEQ ID NO: 159404 - DNA, 15 bp, Homo sapiens
tcaatgtttattgtt

SEQ ID NO: 159405 - DNA, 15 bp, Homo sapiens
caatgtttattgttt

SEQ ID NO: 159406 - DNA, 15 bp, Homo sapiens
aatgtttattgttta

SEQ ID NO: 159407 - DNA, 15 bp, Homo sapiens
atgtttattgtttag

SEQ ID NO: 159408 - DNA, 15 bp, Homo sapiens
tgtttattgtttaga

SEQ ID NO: 159409 - DNA, 15 bp, Homo sapiens
gtttattgtttagat

SEQ ID NO: 159410 - DNA, 15 bp, Homo sapiens
tttattgtttagatg

SEQ ID NO: 159411 - DNA, 15 bp, Homo sapiens
ttattgtttagatgt

SEQ ID NO: 159412 - DNA, 15 bp, Homo sapiens
tattgtttagatgtt

SEQ ID NO: 159413 - DNA, 15 bp, Homo sapiens
attgtttagatgttc

SEQ ID NO: 159414 - DNA, 15 bp, Homo sapiens
ttgtttagatgttca

SEQ ID NO: 159415 - DNA, 15 bp, Homo sapiens
tgtttagatgttcag

SEQ ID NO: 159416 - DNA, 15 bp, Homo sapiens
gtttagatgttcaga

SEQ ID NO: 159417 - DNA, 15 bp, Homo sapiens
tttagatgttcagaa

SEQ ID NO: 159418 - DNA, 15 bp, Homo sapiens
ttagatgttcagaat

SEQ ID NO: 159419 - DNA, 15 bp, Homo sapiens
tagatgttcagaata

SEQ ID NO: 159420 - DNA, 15 bp, Homo sapiens
agatgttcagaataa

SEQ ID NO: 159421 - DNA, 15 bp, Homo sapiens
gatgttcagaataaa

SEQ ID NO: 159422 - DNA, 15 bp, Homo sapiens
atgttcagaataaat

SEQ ID NO: 159423 - DNA, 15 bp, Homo sapiens
tgttcagaataaatt

SEQ ID NO: 159424 - DNA, 15 bp, Homo sapiens
gttcagaataaattc

SEQ ID NO: 159425 - DNA, 15 bp, Homo sapiens
ttcagaataaattct

SEQ ID NO: 159426 - DNA, 15 bp, Homo sapiens
tcagaataaattctt

SEQ ID NO: 159427 - DNA, 15 bp, Homo sapiens
cagaataaattcttg

SEQ ID NO: 159428 - DNA, 15 bp, Homo sapiens
agaataaattcttgg

SEQ ID NO: 159429 - DNA, 15 bp, Homo sapiens
gaataaattcttggg

SEQ ID NO: 159430 - DNA, 15 bp, Homo sapiens
aataaattcttggga

SEQ ID NO: 159431 - DNA, 15 bp, Homo sapiens
ataaattcttgggaa

SEQ ID NO: 159432 - DNA, 15 bp, Homo sapiens
taaattcttgggaaa

SEQ ID NO: 159433 - DNA, 15 bp, Homo sapiens
aaattcttgggaaag

SEQ ID NO: 159434 - DNA, 15 bp, Homo sapiens
aattcttgggaaaga

SEQ ID NO: 159435 - DNA, 15 bp, Homo sapiens
attcttgggaaagac

SEQ ID NO: 159436 - DNA, 15 bp, Homo sapiens
ttcttgggaaagacc

SEQ ID NO: 159437 - DNA, 15 bp, Homo sapiens
tcttgggaaagacct

SEQ ID NO: 159438 - DNA, 15 bp, Homo sapiens
cttgggaaagacctt

SEQ ID NO: 159439 - DNA, 15 bp, Homo sapiens
ttgggaaagaccttg

SEQ ID NO: 159440 - DNA, 15 bp, Homo sapiens
tgggaaagaccttgg

SEQ ID NO: 159441 - DNA, 15 bp, Homo sapiens
gggaaagaccttggc

SEQ ID NO: 159442 - DNA, 15 bp, Homo sapiens
ggaaagaccttggct

SEQ ID NO: 159443 - DNA, 15 bp, Homo sapiens
gaaagaccttggctt

SEQ ID NO: 159444 - DNA, 15 bp, Homo sapiens
aaagaccttggcttg

SEQ ID NO: 159445 - DNA, 15 bp, Homo sapiens
aagaccttggcttgg

SEQ ID NO: 159446 - DNA, 15 bp, Homo sapiens
agaccttggcttggt

SEQ ID NO: 159447 - DNA, 15 bp, Homo sapiens
gaccttggcttggtg

SEQ ID NO: 159448 - DNA, 15 bp, Homo sapiens
accttggcttggtgt

SEQ ID NO: 159449 - DNA, 15 bp, Homo sapiens
ccttggcttggtgta

SEQ ID NO: 159450 - DNA, 15 bp, Homo sapiens
cttggcttggtgtaa

SEQ ID NO: 159451 - DNA, 15 bp, Homo sapiens
ttggcttggtgtaag

SEQ ID NO: 159452 - DNA, 15 bp, Homo sapiens
tggcttggtgtaagt

SEQ ID NO: 159453 - DNA, 15 bp, Homo sapiens
ggcttggtgtaagtg

SEQ ID NO: 159454 - DNA, 15 bp, Homo sapiens
gcttggtgtaagtga

SEQ ID NO: 159455 - DNA, 15 bp, Homo sapiens
cttggtgtaagtgaa

SEQ ID NO: 159456 - DNA, 15 bp, Homo sapiens
ttggtgtaagtgaat

SEQ ID NO: 159457 - DNA, 15 bp, Homo sapiens
tggtgtaagtgaatt

SEQ ID NO: 159458 - DNA, 15 bp, Homo sapiens
ggtgtaagtgaatta

SEQ ID NO: 159459 - DNA, 15 bp, Homo sapiens
gtgtaagtgaattac

SEQ ID NO: 159460 - DNA, 15 bp, Homo sapiens
tgtaagtgaattacc

SEQ ID NO: 159461 - DNA, 15 bp, Homo sapiens
gtaagtgaattacca

SEQ ID NO: 159462 - DNA, 15 bp, Homo sapiens
taagtgaattaccag

SEQ ID NO: 159463 - DNA, 15 bp, Homo sapiens
aagtgaattaccagt

SEQ ID NO: 159464 - DNA, 15 bp, Homo sapiens
agtgaattaccagtg

SEQ ID NO: 159465 - DNA, 15 bp, Homo sapiens
gtgaattaccagtgc

SEQ ID NO: 159466 - DNA, 15 bp, Homo sapiens
tgaattaccagtgcc

SEQ ID NO: 159467 - DNA, 15 bp, Homo sapiens
gaattaccagtgccg

SEQ ID NO: 159468 - DNA, 15 bp, Homo sapiens
aattaccagtgccga

SEQ ID NO: 159469 - DNA, 15 bp, Homo sapiens
attaccagtgccgag

SEQ ID NO: 159470 - DNA, 15 bp, Homo sapiens
ttaccagtgccgagg

SEQ ID NO: 159471 - DNA, 15 bp, Homo sapiens
taccagtgccgaggg

SEQ ID NO: 159472 - DNA, 15 bp, Homo sapiens
accagtgccgagggc

SEQ ID NO: 159473 - DNA, 15 bp, Homo sapiens
ccagtgccgagggca

SEQ ID NO: 159474 - DNA, 15 bp, Homo sapiens
cagtgccgagggcag

SEQ ID NO: 159475 - DNA, 15 bp, Homo sapiens
agtgccgagggcagg

SEQ ID NO: 159476 - DNA, 15 bp, Homo sapiens
gtgccgagggcaggg

SEQ ID NO: 159477 - DNA, 15 bp, Homo sapiens
tgccgagggcagggt

SEQ ID NO: 159478 - DNA, 15 bp, Homo sapiens
gccgagggcagggtg

SEQ ID NO: 159479 - DNA, 15 bp, Homo sapiens
ccgagggcagggtga

SEQ ID NO: 159480 - DNA, 15 bp, Homo sapiens
cgagggcagggtgaa

SEQ ID NO: 159481 - DNA, 15 bp, Homo sapiens
gagggcagggtgaac

SEQ ID NO: 159482 - DNA, 15 bp, Homo sapiens
agggcagggtgaacc

SEQ ID NO: 159483 - DNA, 15 bp, Homo sapiens
gggcagggtgaacca

SEQ ID NO: 159484 - DNA, 15 bp, Homo sapiens
ggcagggtgaaccaa

SEQ ID NO: 159485 - DNA, 15 bp, Homo sapiens
gcagggtgaaccaag

SEQ ID NO: 159486 - DNA, 15 bp, Homo sapiens
cagggtgaaccaagt

SEQ ID NO: 159487 - DNA, 15 bp, Homo sapiens
agggtgaaccaagtc

SEQ ID NO: 159488 - DNA, 15 bp, Homo sapiens
gggtgaaccaagtct

SEQ ID NO: 159489 - DNA, 15 bp, Homo sapiens
ggtgaaccaagtctc

SEQ ID NO: 159490 - DNA, 15 bp, Homo sapiens
gtgaaccaagtctca

SEQ ID NO: 159491 - DNA, 15 bp, Homo sapiens
tgaaccaagtctcag

SEQ ID NO: 159492 - DNA, 15 bp, Homo sapiens
gaaccaagtctcagt

SEQ ID NO: 159493 - DNA, 15 bp, Homo sapiens
aaccaagtctcagtg

SEQ ID NO: 159494 - DNA, 15 bp, Homo sapiens
accaagtctcagtgc

SEQ ID NO: 159495 - DNA, 15 bp, Homo sapiens
ccaagtctcagtgct

SEQ ID NO: 159496 - DNA, 15 bp, Homo sapiens
caagtctcagtgctg

SEQ ID NO: 159497 - DNA, 15 bp, Homo sapiens
aagtctcagtgctgg

SEQ ID NO: 159498 - DNA, 15 bp, Homo sapiens
agtctcagtgctggt

SEQ ID NO: 159499 - DNA, 15 bp, Homo sapiens
gtctcagtgctggtt

SEQ ID NO: 159500 - DNA, 15 bp, Homo sapiens
tctcagtgctggttg

SEQ ID NO: 159501 - DNA, 15 bp, Homo sapiens
ctcagtgctggttga

SEQ ID NO: 159502 - DNA, 15 bp, Homo sapiens
tcagtgctggttgac

SEQ ID NO: 159503 - DNA, 15 bp, Homo sapiens
cagtgctggttgact

SEQ ID NO: 159504 - DNA, 15 bp, Homo sapiens
agtgctggttgactg

SEQ ID NO: 159505 - DNA, 15 bp, Homo sapiens
gtgctggttgactga

SEQ ID NO: 159506 - DNA, 15 bp, Homo sapiens
tgctggttgactgag

SEQ ID NO: 159507 - DNA, 15 bp, Homo sapiens
gctggttgactgagg

SEQ ID NO: 159508 - DNA, 15 bp, Homo sapiens
ctggttgactgaggg

SEQ ID NO: 159509 - DNA, 15 bp, Homo sapiens
tggttgactgagggc

SEQ ID NO: 159510 - DNA, 15 bp, Homo sapiens
ggttgactgagggca

SEQ ID NO: 159511 - DNA, 15 bp, Homo sapiens
gttgactgagggcag

SEQ ID NO: 159512 - DNA, 15 bp, Homo sapiens
ttgactgagggcagt

SEQ ID NO: 159513 - DNA, 15 bp, Homo sapiens
tgactgagggcagtg

SEQ ID NO: 159514 - DNA, 15 bp, Homo sapiens
gactgagggcagtgt

SEQ ID NO: 159515 - DNA, 15 bp, Homo sapiens
actgagggcagtgtc

SEQ ID NO: 159516 - DNA, 15 bp, Homo sapiens
ctgagggcagtgtct

SEQ ID NO: 159517 - DNA, 15 bp, Homo sapiens
tgagggcagtgtctg

SEQ ID NO: 159518 - DNA, 15 bp, Homo sapiens
gagggcagtgtctgg

SEQ ID NO: 159519 - DNA, 15 bp, Homo sapiens
agggcagtgtctggg

SEQ ID NO: 159520 - DNA, 15 bp, Homo sapiens
gggcagtgtctggga

SEQ ID NO: 159521 - DNA, 15 bp, Homo sapiens
ggcagtgtctgggac

SEQ ID NO: 159522 - DNA, 15 bp, Homo sapiens
gcagtgtctgggacc

SEQ ID NO: 159523 - DNA, 15 bp, Homo sapiens
cagtgtctgggacct

SEQ ID NO: 159524 - DNA, 15 bp, Homo sapiens
agtgtctgggacctg

SEQ ID NO: 159525 - DNA, 15 bp, Homo sapiens
gtgtctgggacctgt

SEQ ID NO: 159526 - DNA, 15 bp, Homo sapiens
tgtctgggacctgta

SEQ ID NO: 159527 - DNA, 15 bp, Homo sapiens
gtctgggacctgtag

SEQ ID NO: 159528 - DNA, 15 bp, Homo sapiens
tctgggacctgtagt

SEQ ID NO: 159529 - DNA, 15 bp, Homo sapiens
ctgggacctgtagtc

SEQ ID NO: 159530 - DNA, 15 bp, Homo sapiens
tgggacctgtagtca

SEQ ID NO: 159531 - DNA, 15 bp, Homo sapiens
gggacctgtagtcag

SEQ ID NO: 159532 - DNA, 15 bp, Homo sapiens
ggacctgtagtcagg

SEQ ID NO: 159533 - DNA, 15 bp, Homo sapiens
gacctgtagtcaggt

SEQ ID NO: 159534 - DNA, 15 bp, Homo sapiens
acctgtagtcaggtt

SEQ ID NO: 159535 - DNA, 15 bp, Homo sapiens
cctgtagtcaggttt

SEQ ID NO: 159536 - DNA, 15 bp, Homo sapiens
ctgtagtcaggtttc

SEQ ID NO: 159537 - DNA, 15 bp, Homo sapiens
tgtagtcaggtttcc

SEQ ID NO: 159538 - DNA, 15 bp, Homo sapiens
gtagtcaggtttccg

SEQ ID NO: 159539 - DNA, 15 bp, Homo sapiens
tagtcaggtttccgg

SEQ ID NO: 159540 - DNA, 15 bp, Homo sapiens
agtcaggtttccggt

SEQ ID NO: 159541 - DNA, 15 bp, Homo sapiens
gtcaggtttccggtc

SEQ ID NO: 159542 - DNA, 15 bp, Homo sapiens
tcaggtttccggtca

SEQ ID NO: 159543 - DNA, 15 bp, Homo sapiens
caggtttccggtcac

SEQ ID NO: 159544 - DNA, 15 bp, Homo sapiens
aggtttccggtcaca

SEQ ID NO: 159545 - DNA, 15 bp, Homo sapiens
ggtttccggtcacac

SEQ ID NO: 159546 - DNA, 15 bp, Homo sapiens
gtttccggtcacact

SEQ ID NO: 159547 - DNA, 15 bp, Homo sapiens
tttccggtcacactg

SEQ ID NO: 159548 - DNA, 15 bp, Homo sapiens
ttccggtcacactgt

SEQ ID NO: 159549 - DNA, 15 bp, Homo sapiens
tccggtcacactgtg

SEQ ID NO: 159550 - DNA, 15 bp, Homo sapiens
ccggtcacactgtgg

SEQ ID NO: 159551 - DNA, 15 bp, Homo sapiens
cggtcacactgtgga

SEQ ID NO: 159552 - DNA, 15 bp, Homo sapiens
ggtcacactgtggac

SEQ ID NO: 159553 - DNA, 15 bp, Homo sapiens
gtcacactgtggaca

SEQ ID NO: 159554 - DNA, 15 bp, Homo sapiens
tcacactgtggacat

SEQ ID NO: 159555 - DNA, 15 bp, Homo sapiens
cacactgtggacatg

SEQ ID NO: 159556 - DNA, 15 bp, Homo sapiens
acactgtggacatgg

SEQ ID NO: 159557 - DNA, 15 bp, Homo sapiens
cactgtggacatggt

SEQ ID NO: 159558 - DNA, 15 bp, Homo sapiens
actgtggacatggtc

SEQ ID NO: 159559 - DNA, 15 bp, Homo sapiens
ctgtggacatggtca

SEQ ID NO: 159560 - DNA, 15 bp, Homo sapiens
tgtggacatggtcac

SEQ ID NO: 159561 - DNA, 15 bp, Homo sapiens
gtggacatggtcact

SEQ ID NO: 159562 - DNA, 15 bp, Homo sapiens
tggacatggtcactg

SEQ ID NO: 159563 - DNA, 15 bp, Homo sapiens
ggacatggtcactgt

SEQ ID NO: 159564 - DNA, 15 bp, Homo sapiens
gacatggtcactgtt

SEQ ID NO: 159565 - DNA, 15 bp, Homo sapiens
acatggtcactgttg

SEQ ID NO: 159566 - DNA, 15 bp, Homo sapiens
catggtcactgttgt

SEQ ID NO: 159567 - DNA, 15 bp, Homo sapiens
atggtcactgttgtc

SEQ ID NO: 159568 - DNA, 15 bp, Homo sapiens
tggtcactgttgtcc

SEQ ID NO: 159569 - DNA, 15 bp, Homo sapiens
ggtcactgttgtcct

SEQ ID NO: 159570 - DNA, 15 bp, Homo sapiens
gtcactgttgtcctt

SEQ ID NO: 159571 - DNA, 15 bp, Homo sapiens
tcactgttgtccttg

SEQ ID NO: 159572 - DNA, 15 bp, Homo sapiens
cactgttgtccttga

SEQ ID NO: 159573 - DNA, 15 bp, Homo sapiens
actgttgtccttgat

SEQ ID NO: 159574 - DNA, 15 bp, Homo sapiens
ctgttgtccttgatt

SEQ ID NO: 159575 - DNA, 15 bp, Homo sapiens
tgttgtccttgattt

SEQ ID NO: 159576 - DNA, 15 bp, Homo sapiens
gttgtccttgatttg

SEQ ID NO: 159577 - DNA, 15 bp, Homo sapiens
ttgtccttgatttgt

SEQ ID NO: 159578 - DNA, 15 bp, Homo sapiens
tgtccttgatttgtt

SEQ ID NO: 159579 - DNA, 15 bp, Homo sapiens
gtccttgatttgttt

SEQ ID NO: 159580 - DNA, 15 bp, Homo sapiens
tccttgatttgtttt

SEQ ID NO: 159581 - DNA, 15 bp, Homo sapiens
ccttgatttgttttc

SEQ ID NO: 159582 - DNA, 15 bp, Homo sapiens
cttgatttgttttct

SEQ ID NO: 159583 - DNA, 15 bp, Homo sapiens
ttgatttgttttctg

SEQ ID NO: 159584 - DNA, 15 bp, Homo sapiens
tgatttgttttctgt

SEQ ID NO: 159585 - DNA, 15 bp, Homo sapiens
gatttgttttctgtt

SEQ ID NO: 159586 - DNA, 15 bp, Homo sapiens
atttgttttctgttt

SEQ ID NO: 159587 - DNA, 15 bp, Homo sapiens
tttgttttctgtttc

SEQ ID NO: 159588 - DNA, 15 bp, Homo sapiens
ttgttttctgtttca

SEQ ID NO: 159589 - DNA, 15 bp, Homo sapiens
tgttttctgtttcaa

SEQ ID NO: 159590 - DNA, 15 bp, Homo sapiens
gttttctgtttcaat

SEQ ID NO: 159591 - DNA, 15 bp, Homo sapiens
ttttctgtttcaatt

SEQ ID NO: 159592 - DNA, 15 bp, Homo sapiens
tttctgtttcaattc

SEQ ID NO: 159593 - DNA, 15 bp, Homo sapiens
ttctgtttcaattct

SEQ ID NO: 159594 - DNA, 15 bp, Homo sapiens
tctgtttcaattctt

SEQ ID NO: 159595 - DNA, 15 bp, Homo sapiens
ctgtttcaattcttg

SEQ ID NO: 159596 - DNA, 15 bp, Homo sapiens
tgtttcaattcttgt

SEQ ID NO: 159597 - DNA, 15 bp, Homo sapiens
gtttcaattcttgtc

SEQ ID NO: 159598 - DNA, 15 bp, Homo sapiens
tttcaattcttgtct

SEQ ID NO: 159599 - DNA, 15 bp, Homo sapiens
ttcaattcttgtcta

SEQ ID NO: 159600 - DNA, 15 bp, Homo sapiens
tcaattcttgtctat

SEQ ID NO: 159601 - DNA, 15 bp, Homo sapiens
caattcttgtctata

SEQ ID NO: 159602 - DNA, 15 bp, Homo sapiens
aattcttgtctataa

SEQ ID NO: 159603 - DNA, 15 bp, Homo sapiens
attcttgtctataaa

SEQ ID NO: 159604 - DNA, 15 bp, Homo sapiens
ttcttgtctataaag

SEQ ID NO: 159605 - DNA, 15 bp, Homo sapiens
tcttgtctataaaga

SEQ ID NO: 159606 - DNA, 15 bp, Homo sapiens
cttgtctataaagac

SEQ ID NO: 159607 - DNA, 15 bp, Homo sapiens
ttgtctataaagacc

SEQ ID NO: 159608 - DNA, 15 bp, Homo sapiens
tgtctataaagaccc

SEQ ID NO: 159609 - DNA, 15 bp, Homo sapiens
gtctataaagacccg

SEQ ID NO: 159610 - DNA, 15 bp, Homo sapiens
tctataaagacccgt

SEQ ID NO: 159611 - DNA, 15 bp, Homo sapiens
ctataaagacccgta

SEQ ID NO: 159612 - DNA, 15 bp, Homo sapiens
tataaagacccgtat

SEQ ID NO: 159613 - DNA, 15 bp, Homo sapiens
ataaagacccgtatg

SEQ ID NO: 159614 - DNA, 15 bp, Homo sapiens
taaagacccgtatgc

SEQ ID NO: 159615 - DNA, 15 bp, Homo sapiens
aaagacccgtatgct

SEQ ID NO: 159616 - DNA, 15 bp, Homo sapiens
aagacccgtatgctt

SEQ ID NO: 159617 - DNA, 15 bp, Homo sapiens
agacccgtatgcttg

SEQ ID NO: 159618 - DNA, 15 bp, Homo sapiens
gacccgtatgcttgg

SEQ ID NO: 159619 - DNA, 15 bp, Homo sapiens
acccgtatgcttggt

SEQ ID NO: 159620 - DNA, 15 bp, Homo sapiens
cccgtatgcttggtt

SEQ ID NO: 159621 - DNA, 15 bp, Homo sapiens
ccgtatgcttggttt

SEQ ID NO: 159622 - DNA, 15 bp, Homo sapiens
cgtatgcttggtttt

SEQ ID NO: 159623 - DNA, 15 bp, Homo sapiens
gtatgcttggttttc

SEQ ID NO: 159624 - DNA, 15 bp, Homo sapiens
tatgcttggttttca

SEQ ID NO: 159625 - DNA, 15 bp, Homo sapiens
atgcttggttttcat

SEQ ID NO: 159626 - DNA, 15 bp, Homo sapiens
tgcttggttttcatg

SEQ ID NO: 159627 - DNA, 15 bp, Homo sapiens
gcttggttttcatgt

SEQ ID NO: 159628 - DNA, 15 bp, Homo sapiens
cttggttttcatgtg

SEQ ID NO: 159629 - DNA, 15 bp, Homo sapiens
ttggttttcatgtga

SEQ ID NO: 159630 - DNA, 15 bp, Homo sapiens
tggttttcatgtgat

SEQ ID NO: 159631 - DNA, 15 bp, Homo sapiens
ggttttcatgtgatg

SEQ ID NO: 159632 - DNA, 15 bp, Homo sapiens
gttttcatgtgatga

SEQ ID NO: 159633 - DNA, 15 bp, Homo sapiens
ttttcatgtgatgac

SEQ ID NO: 159634 - DNA, 15 bp, Homo sapiens
tttcatgtgatgaca

SEQ ID NO: 159635 - DNA, 15 bp, Homo sapiens
ttcatgtgatgacag

SEQ ID NO: 159636 - DNA, 15 bp, Homo sapiens
tcatgtgatgacaga

SEQ ID NO: 159637 - DNA, 15 bp, Homo sapiens
catgtgatgacagag

SEQ ID NO: 159638 - DNA, 15 bp, Homo sapiens
atgtgatgacagaga

SEQ ID NO: 159639 - DNA, 15 bp, Homo sapiens
tgtgatgacagagaa

SEQ ID NO: 159640 - DNA, 15 bp, Homo sapiens
gtgatgacagagaaa

SEQ ID NO: 159641 - DNA, 15 bp, Homo sapiens
tgatgacagagaaaa

SEQ ID NO: 159642 - DNA, 15 bp, Homo sapiens
gatgacagagaaaac

SEQ ID NO: 159643 - DNA, 15 bp, Homo sapiens
atgacagagaaaaca

SEQ ID NO: 159644 - DNA, 15 bp, Homo sapiens
tgacagagaaaacaa

SEQ ID NO: 159645 - DNA, 15 bp, Homo sapiens
gacagagaaaacaaa

SEQ ID NO: 159646 - DNA, 15 bp, Homo sapiens
acagagaaaacaaaa

SEQ ID NO: 159647 - DNA, 15 bp, Homo sapiens
cagagaaaacaaaac

SEQ ID NO: 159648 - DNA, 15 bp, Homo sapiens
agagaaaacaaaaca

SEQ ID NO: 159649 - DNA, 15 bp, Homo sapiens
gagaaaacaaaacac

SEQ ID NO: 159650 - DNA, 15 bp, Homo sapiens
agaaaacaaaacact

SEQ ID NO: 159651 - DNA, 15 bp, Homo sapiens
gaaaacaaaacactg

SEQ ID NO: 159652 - DNA, 15 bp, Homo sapiens
aaaacaaaacactgc

SEQ ID NO: 159653 - DNA, 15 bp, Homo sapiens
aaacaaaacactgca

SEQ ID NO: 159654 - DNA, 15 bp, Homo sapiens
aacaaaacactgcag

SEQ ID NO: 159655 - DNA, 15 bp, Homo sapiens
acaaaacactgcaga

SEQ ID NO: 159656 - DNA, 15 bp, Homo sapiens
caaaacactgcagat

SEQ ID NO: 159657 - DNA, 15 bp, Homo sapiens
aaaacactgcagata

SEQ ID NO: 159658 - DNA, 15 bp, Homo sapiens
aaacactgcagatat

SEQ ID NO: 159659 - DNA, 15 bp, Homo sapiens
aacactgcagatatc

SEQ ID NO: 159660 - DNA, 15 bp, Homo sapiens
acactgcagatatcc

SEQ ID NO: 159661 - DNA, 15 bp, Homo sapiens
cactgcagatatcct

SEQ ID NO: 159662 - DNA, 15 bp, Homo sapiens
actgcagatatcctt

SEQ ID NO: 159663 - DNA, 15 bp, Homo sapiens
ctgcagatatccttc

SEQ ID NO: 159664 - DNA, 15 bp, Homo sapiens
tgcagatatccttca

SEQ ID NO: 159665 - DNA, 15 bp, Homo sapiens
gcagatatccttcag

SEQ ID NO: 159666 - DNA, 15 bp, Homo sapiens
cagatatccttcagg

SEQ ID NO: 159667 - DNA, 15 bp, Homo sapiens
agatatccttcagga

SEQ ID NO: 159668 - DNA, 15 bp, Homo sapiens
gatatccttcaggac

SEQ ID NO: 159669 - DNA, 15 bp, Homo sapiens
atatccttcaggacc

SEQ ID NO: 159670 - DNA, 15 bp, Homo sapiens
tatccttcaggacct

SEQ ID NO: 159671 - DNA, 15 bp, Homo sapiens
atccttcaggacctg

SEQ ID NO: 159672 - DNA, 15 bp, Homo sapiens
tccttcaggacctga

SEQ ID NO: 159673 - DNA, 15 bp, Homo sapiens
ccttcaggacctgac

SEQ ID NO: 159674 - DNA, 15 bp, Homo sapiens
cttcaggacctgaca

SEQ ID NO: 159675 - DNA, 15 bp, Homo sapiens
ttcaggacctgacag

SEQ ID NO: 159676 - DNA, 15 bp, Homo sapiens
tcaggacctgacagg

SEQ ID NO: 159677 - DNA, 15 bp, Homo sapiens
caggacctgacagga

SEQ ID NO: 159678 - DNA, 15 bp, Homo sapiens
aggacctgacaggaa

SEQ ID NO: 159679 - DNA, 15 bp, Homo sapiens
ggacctgacaggaag

SEQ ID NO: 159680 - DNA, 15 bp, Homo sapiens
gacctgacaggaaga

SEQ ID NO: 159681 - DNA, 15 bp, Homo sapiens
acctgacaggaagaa

SEQ ID NO: 159682 - DNA, 15 bp, Homo sapiens
cctgacaggaagaaa

SEQ ID NO: 159683 - DNA, 15 bp, Homo sapiens
ctgacaggaagaaac

SEQ ID NO: 159684 - DNA, 15 bp, Homo sapiens
tgacaggaagaaaca

SEQ ID NO: 159685 - DNA, 15 bp, Homo sapiens
gacaggaagaaacat

SEQ ID NO: 159686 - DNA, 15 bp, Homo sapiens
acaggaagaaacatt

SEQ ID NO: 159687 - DNA, 15 bp, Homo sapiens
caggaagaaacattt

SEQ ID NO: 159688 - DNA, 15 bp, Homo sapiens
aggaagaaacatttc

SEQ ID NO: 159689 - DNA, 15 bp, Homo sapiens
ggaagaaacatttcg

SEQ ID NO: 159690 - DNA, 15 bp, Homo sapiens
gaagaaacatttcgg

SEQ ID NO: 159691 - DNA, 15 bp, Homo sapiens
aagaaacatttcgga

SEQ ID NO: 159692 - DNA, 15 bp, Homo sapiens
agaaacatttcggat

SEQ ID NO: 159693 - DNA, 15 bp, Homo sapiens
gaaacatttcggatt

SEQ ID NO: 159694 - DNA, 15 bp, Homo sapiens
aaacatttcggatta

SEQ ID NO: 159695 - DNA, 15 bp, Homo sapiens
aacatttcggattat

SEQ ID NO: 159696 - DNA, 15 bp, Homo sapiens
acatttcggattatc

SEQ ID NO: 159697 - DNA, 15 bp, Homo sapiens
catttcggattatct

SEQ ID NO: 159698 - DNA, 15 bp, Homo sapiens
atttcggattatctg

SEQ ID NO: 159699 - DNA, 15 bp, Homo sapiens
tttcggattatctgg

SEQ ID NO: 159700 - DNA, 15 bp, Homo sapiens
ttcggattatctggt

SEQ ID NO: 159701 - DNA, 15 bp, Homo sapiens
tcggattatctggtg

SEQ ID NO: 159702 - DNA, 15 bp, Homo sapiens
cggattatctggtga

SEQ ID NO: 159703 - DNA, 15 bp, Homo sapiens
ggattatctggtgaa

SEQ ID NO: 159704 - DNA, 15 bp, Homo sapiens
gattatctggtgaag

SEQ ID NO: 159705 - DNA, 15 bp, Homo sapiens
attatctggtgaaga

SEQ ID NO: 159706 - DNA, 15 bp, Homo sapiens
ttatctggtgaagac

SEQ ID NO: 159707 - DNA, 15 bp, Homo sapiens
tatctggtgaagacg

SEQ ID NO: 159708 - DNA, 15 bp, Homo sapiens
atctggtgaagacgt

SEQ ID NO: 159709 - DNA, 15 bp, Homo sapiens
tctggtgaagacgta

SEQ ID NO: 159710 - DNA, 15 bp, Homo sapiens
ctggtgaagacgtat

SEQ ID NO: 159711 - DNA, 15 bp, Homo sapiens
tggtgaagacgtatg

SEQ ID NO: 159712 - DNA, 15 bp, Homo sapiens
ggtgaagacgtatgt

SEQ ID NO: 159713 - DNA, 15 bp, Homo sapiens
gtgaagacgtatgtg

SEQ ID NO: 159714 - DNA, 15 bp, Homo sapiens
tgaagacgtatgtgc

SEQ ID NO: 159715 - DNA, 15 bp, Homo sapiens
gaagacgtatgtgca

SEQ ID NO: 159716 - DNA, 15 bp, Homo sapiens
aagacgtatgtgcag

SEQ ID NO: 159717 - DNA, 15 bp, Homo sapiens
agacgtatgtgcaga

SEQ ID NO: 159718 - DNA, 15 bp, Homo sapiens
gacgtatgtgcagat

SEQ ID NO: 159719 - DNA, 15 bp, Homo sapiens
acgtatgtgcagatc

SEQ ID NO: 159720 - DNA, 15 bp, Homo sapiens
cgtatgtgcagatca

SEQ ID NO: 159721 - DNA, 15 bp, Homo sapiens
gtatgtgcagatcat

SEQ ID NO: 159722 - DNA, 15 bp, Homo sapiens
tatgtgcagatcata

SEQ ID NO: 159723 - DNA, 15 bp, Homo sapiens
atgtgcagatcatag

SEQ ID NO: 159724 - DNA, 15 bp, Homo sapiens
tgtgcagatcatagc

SEQ ID NO: 159725 - DNA, 15 bp, Homo sapiens
gtgcagatcatagcc

SEQ ID NO: 159726 - DNA, 15 bp, Homo sapiens
tgcagatcatagcca

SEQ ID NO: 159727 - DNA, 15 bp, Homo sapiens
gcagatcatagccaa

SEQ ID NO: 159728 - DNA, 15 bp, Homo sapiens
cagatcatagccaaa

SEQ ID NO: 159729 - DNA, 15 bp, Homo sapiens
agatcatagccaaaa

SEQ ID NO: 159730 - DNA, 15 bp, Homo sapiens
gatcatagccaaaag

SEQ ID NO: 159731 - DNA, 15 bp, Homo sapiens
atcatagccaaaagg

SEQ ID NO: 159732 - DNA, 15 bp, Homo sapiens
tcatagccaaaaggt

SEQ ID NO: 159733 - DNA, 15 bp, Homo sapiens
catagccaaaaggtg

SEQ ID NO: 159734 - DNA, 15 bp, Homo sapiens
atagccaaaaggtga

SEQ ID NO: 159735 - DNA, 15 bp, Homo sapiens
tagccaaaaggtgac

SEQ ID NO: 159736 - DNA, 15 bp, Homo sapiens
agccaaaaggtgact

SEQ ID NO: 159737 - DNA, 15 bp, Homo sapiens
gccaaaaggtgactt

SEQ ID NO: 159738 - DNA, 15 bp, Homo sapiens
ccaaaaggtgacttt

SEQ ID NO: 159739 - DNA, 15 bp, Homo sapiens
caaaaggtgactttt

SEQ ID NO: 159740 - DNA, 15 bp, Homo sapiens
aaaaggtgacttttt

SEQ ID NO: 159741 - DNA, 15 bp, Homo sapiens
aaaggtgacttttta

SEQ ID NO: 159742 - DNA, 15 bp, Homo sapiens
aaggtgactttttac

SEQ ID NO: 159743 - DNA, 15 bp, Homo sapiens
aggtgactttttact

SEQ ID NO: 159744 - DNA, 15 bp, Homo sapiens
ggtgactttttacta

SEQ ID NO: 159745 - DNA, 15 bp, Homo sapiens
gtgactttttactaa

SEQ ID NO: 159746 - DNA, 15 bp, Homo sapiens
tgactttttactaaa

SEQ ID NO: 159747 - DNA, 15 bp, Homo sapiens
gactttttactaaac

SEQ ID NO: 159748 - DNA, 15 bp, Homo sapiens
actttttactaaact

SEQ ID NO: 159749 - DNA, 15 bp, Homo sapiens
ctttttactaaactt

SEQ ID NO: 159750 - DNA, 15 bp, Homo sapiens
tttttactaaacttg

SEQ ID NO: 159751 - DNA, 15 bp, Homo sapiens
ttttactaaacttgg

SEQ ID NO: 159752 - DNA, 15 bp, Homo sapiens
tttactaaacttggc

SEQ ID NO: 159753 - DNA, 15 bp, Homo sapiens
ttactaaacttggcc

SEQ ID NO: 159754 - DNA, 15 bp, Homo sapiens
tactaaacttggccc

SEQ ID NO: 159755 - DNA, 15 bp, Homo sapiens
actaaacttggcccc

SEQ ID NO: 159756 - DNA, 15 bp, Homo sapiens
ctaaacttggcccct

SEQ ID NO: 159757 - DNA, 15 bp, Homo sapiens
taaacttggcccctg

SEQ ID NO: 159758 - DNA, 15 bp, Homo sapiens
aaacttggcccctgc

SEQ ID NO: 159759 - DNA, 15 bp, Homo sapiens
aacttggcccctgcc

SEQ ID NO: 159760 - DNA, 15 bp, Homo sapiens
acttggcccctgccg

SEQ ID NO: 159761 - DNA, 15 bp, Homo sapiens
cttggcccctgccgt

SEQ ID NO: 159762 - DNA, 15 bp, Homo sapiens
ttggcccctgccgta

SEQ ID NO: 159763 - DNA, 15 bp, Homo sapiens
tggcccctgccgtat

SEQ ID NO: 159764 - DNA, 15 bp, Homo sapiens
ggcccctgccgtatt

SEQ ID NO: 159765 - DNA, 15 bp, Homo sapiens
gcccctgccgtatta

SEQ ID NO: 159766 - DNA, 15 bp, Homo sapiens
cccctgccgtattat

SEQ ID NO: 159767 - DNA, 15 bp, Homo sapiens
ccctgccgtattatt

SEQ ID NO: 159768 - DNA, 15 bp, Homo sapiens
cctgccgtattatta

SEQ ID NO: 159769 - DNA, 15 bp, Homo sapiens
ctgccgtattattac

SEQ ID NO: 159770 - DNA, 15 bp, Homo sapiens
tgccgtattattact

SEQ ID NO: 159771 - DNA, 15 bp, Homo sapiens
gccgtattattacta

SEQ ID NO: 159772 - DNA, 15 bp, Homo sapiens
ccgtattattactaa

SEQ ID NO: 159773 - DNA, 15 bp, Homo sapiens
cgtattattactaat

SEQ ID NO: 159774 - DNA, 15 bp, Homo sapiens
gtattattactaatt

SEQ ID NO: 159775 - DNA, 15 bp, Homo sapiens
tattattactaatta

SEQ ID NO: 159776 - DNA, 15 bp, Homo sapiens
attattactaattag

SEQ ID NO: 159777 - DNA, 15 bp, Homo sapiens
ttattactaattaga

SEQ ID NO: 159778 - DNA, 15 bp, Homo sapiens
tattactaattagag

SEQ ID NO: 159779 - DNA, 15 bp, Homo sapiens
attactaattagagg

SEQ ID NO: 159780 - DNA, 15 bp, Homo sapiens
ttactaattagagga

SEQ ID NO: 159781 - DNA, 15 bp, Homo sapiens
tactaattagaggaa

SEQ ID NO: 159782 - DNA, 15 bp, Homo sapiens
actaattagaggaat

SEQ ID NO: 159783 - DNA, 15 bp, Homo sapiens
ctaattagaggaatt

SEQ ID NO: 159784 - DNA, 15 bp, Homo sapiens
taattagaggaatta

SEQ ID NO: 159785 - DNA, 15 bp, Homo sapiens
aattagaggaattaa

SEQ ID NO: 159786 - DNA, 15 bp, Homo sapiens
attagaggaattaaa

SEQ ID NO: 159787 - DNA, 15 bp, Homo sapiens
ttagaggaattaaag

SEQ ID NO: 159788 - DNA, 15 bp, Homo sapiens
tagaggaattaaaga

SEQ ID NO: 159789 - DNA, 15 bp, Homo sapiens
agaggaattaaagac

SEQ ID NO: 159790 - DNA, 15 bp, Homo sapiens
gaggaattaaagacc

SEQ ID NO: 159791 - DNA, 15 bp, Homo sapiens
aggaattaaagacct

SEQ ID NO: 159792 - DNA, 15 bp, Homo sapiens
ggaattaaagaccta

SEQ ID NO: 159793 - DNA, 15 bp, Homo sapiens
gaattaaagacctac

SEQ ID NO: 159794 - DNA, 15 bp, Homo sapiens
aattaaagacctaca

SEQ ID NO: 159795 - DNA, 15 bp, Homo sapiens
attaaagacctacaa

SEQ ID NO: 159796 - DNA, 15 bp, Homo sapiens
ttaaagacctacaaa

SEQ ID NO: 159797 - DNA, 15 bp, Homo sapiens
taaagacctacaaat

SEQ ID NO: 159798 - DNA, 15 bp, Homo sapiens
aaagacctacaaata

SEQ ID NO: 159799 - DNA, 15 bp, Homo sapiens
aagacctacaaataa

SEQ ID NO: 159800 - DNA, 15 bp, Homo sapiens
agacctacaaataac

SEQ ID NO: 159801 - DNA, 15 bp, Homo sapiens
gacctacaaataaca

SEQ ID NO: 159802 - DNA, 15 bp, Homo sapiens
acctacaaataacag

SEQ ID NO: 159803 - DNA, 15 bp, Homo sapiens
cctacaaataacaga

SEQ ID NO: 159804 - DNA, 15 bp, Homo sapiens
ctacaaataacagac

SEQ ID NO: 159805 - DNA, 15 bp, Homo sapiens
tacaaataacagact

SEQ ID NO: 159806 - DNA, 15 bp, Homo sapiens
acaaataacagactg

SEQ ID NO: 159807 - DNA, 15 bp, Homo sapiens
caaataacagactga

SEQ ID NO: 159808 - DNA, 15 bp, Homo sapiens
aaataacagactgaa

SEQ ID NO: 159809 - DNA, 15 bp, Homo sapiens
aataacagactgaaa

SEQ ID NO: 159810 - DNA, 15 bp, Homo sapiens
ataacagactgaaac

SEQ ID NO: 159811 - DNA, 15 bp, Homo sapiens
taacagactgaaaca

SEQ ID NO: 159812 - DNA, 15 bp, Homo sapiens
aacagactgaaacag

SEQ ID NO: 159813 - DNA, 15 bp, Homo sapiens
acagactgaaacagt

SEQ ID NO: 159814 - DNA, 15 bp, Homo sapiens
cagactgaaacagtg

SEQ ID NO: 159815 - DNA, 15 bp, Homo sapiens
agactgaaacagtgg

SEQ ID NO: 159816 - DNA, 15 bp, Homo sapiens
gactgaaacagtggg

SEQ ID NO: 159817 - DNA, 15 bp, Homo sapiens
actgaaacagtgggg

SEQ ID NO: 159818 - DNA, 15 bp, Homo sapiens
ctgaaacagtggggg

SEQ ID NO: 159819 - DNA, 15 bp, Homo sapiens
tgaaacagtggggga

SEQ ID NO: 159820 - DNA, 15 bp, Homo sapiens
gaaacagtgggggaa

SEQ ID NO: 159821 - DNA, 15 bp, Homo sapiens
aaacagtgggggaaa

SEQ ID NO: 159822 - DNA, 15 bp, Homo sapiens
aacagtgggggaaat

SEQ ID NO: 159823 - DNA, 15 bp, Homo sapiens
acagtgggggaaatg

SEQ ID NO: 159824 - DNA, 15 bp, Homo sapiens
cagtgggggaaatgc

SEQ ID NO: 159825 - DNA, 15 bp, Homo sapiens
agtgggggaaatgcc

SEQ ID NO: 159826 - DNA, 15 bp, Homo sapiens
gtgggggaaatgcca

SEQ ID NO: 159827 - DNA, 15 bp, Homo sapiens
tgggggaaatgccag

SEQ ID NO: 159828 - DNA, 15 bp, Homo sapiens
gggggaaatgccaga

SEQ ID NO: 159829 - DNA, 15 bp, Homo sapiens
ggggaaatgccagat

SEQ ID NO: 159830 - DNA, 15 bp, Homo sapiens
gggaaatgccagatt

SEQ ID NO: 159831 - DNA, 15 bp, Homo sapiens
ggaaatgccagatta

SEQ ID NO: 159832 - DNA, 15 bp, Homo sapiens
gaaatgccagattat

SEQ ID NO: 159833 - DNA, 15 bp, Homo sapiens
aaatgccagattatg

SEQ ID NO: 159834 - DNA, 15 bp, Homo sapiens
aatgccagattatgg

SEQ ID NO: 159835 - DNA, 15 bp, Homo sapiens
atgccagattatggc

SEQ ID NO: 159836 - DNA, 15 bp, Homo sapiens
tgccagattatggcc

SEQ ID NO: 159837 - DNA, 15 bp, Homo sapiens
gccagattatggcct

SEQ ID NO: 159838 - DNA, 15 bp, Homo sapiens
ccagattatggcctg

SEQ ID NO: 159839 - DNA, 15 bp, Homo sapiens
cagattatggcctga

SEQ ID NO: 159840 - DNA, 15 bp, Homo sapiens
agattatggcctgat

SEQ ID NO: 159841 - DNA, 15 bp, Homo sapiens
gattatggcctgatt

SEQ ID NO: 159842 - DNA, 15 bp, Homo sapiens
attatggcctgattc

SEQ ID NO: 159843 - DNA, 15 bp, Homo sapiens
ttatggcctgattct

SEQ ID NO: 159844 - DNA, 15 bp, Homo sapiens
tatggcctgattctg

SEQ ID NO: 159845 - DNA, 15 bp, Homo sapiens
atggcctgattctgt

SEQ ID NO: 159846 - DNA, 15 bp, Homo sapiens
tggcctgattctgtc

SEQ ID NO: 159847 - DNA, 15 bp, Homo sapiens
ggcctgattctgtct

SEQ ID NO: 159848 - DNA, 15 bp, Homo sapiens
gcctgattctgtcta

SEQ ID NO: 159849 - DNA, 15 bp, Homo sapiens
cctgattctgtctat

SEQ ID NO: 159850 - DNA, 15 bp, Homo sapiens
ctgattctgtctatt

SEQ ID NO: 159851 - DNA, 15 bp, Homo sapiens
tgattctgtctattg

SEQ ID NO: 159852 - DNA, 15 bp, Homo sapiens
gattctgtctattgg

SEQ ID NO: 159853 - DNA, 15 bp, Homo sapiens
attctgtctattgga

SEQ ID NO: 159854 - DNA, 15 bp, Homo sapiens
ttctgtctattggaa

SEQ ID NO: 159855 - DNA, 15 bp, Homo sapiens
tctgtctattggaag

SEQ ID NO: 159856 - DNA, 15 bp, Homo sapiens
ctgtctattggaagt

SEQ ID NO: 159857 - DNA, 15 bp, Homo sapiens
tgtctattggaagtt

SEQ ID NO: 159858 - DNA, 15 bp, Homo sapiens
gtctattggaagttt

SEQ ID NO: 159859 - DNA, 15 bp, Homo sapiens
tctattggaagttta

SEQ ID NO: 159860 - DNA, 15 bp, Homo sapiens
ctattggaagtttag

SEQ ID NO: 159861 - DNA, 15 bp, Homo sapiens
tattggaagtttagg

SEQ ID NO: 159862 - DNA, 15 bp, Homo sapiens
attggaagtttagga

SEQ ID NO: 159863 - DNA, 15 bp, Homo sapiens
ttggaagtttaggat

SEQ ID NO: 159864 - DNA, 15 bp, Homo sapiens
tggaagtttaggata

SEQ ID NO: 159865 - DNA, 15 bp, Homo sapiens
ggaagtttaggatat

SEQ ID NO: 159866 - DNA, 15 bp, Homo sapiens
gaagtttaggatatt

SEQ ID NO: 159867 - DNA, 15 bp, Homo sapiens
aagtttaggatatta

SEQ ID NO: 159868 - DNA, 15 bp, Homo sapiens
agtttaggatattat

SEQ ID NO: 159869 - DNA, 15 bp, Homo sapiens
gtttaggatattatc

SEQ ID NO: 159870 - DNA, 15 bp, Homo sapiens
tttaggatattatcc

SEQ ID NO: 159871 - DNA, 15 bp, Homo sapiens
ttaggatattatccc

SEQ ID NO: 159872 - DNA, 15 bp, Homo sapiens
taggatattatccca

SEQ ID NO: 159873 - DNA, 15 bp, Homo sapiens
aggatattatcccaa

SEQ ID NO: 159874 - DNA, 15 bp, Homo sapiens
ggatattatcccaaa

SEQ ID NO: 159875 - DNA, 15 bp, Homo sapiens
gatattatcccaaac

SEQ ID NO: 159876 - DNA, 15 bp, Homo sapiens
atattatcccaaact

SEQ ID NO: 159877 - DNA, 15 bp, Homo sapiens
tattatcccaaacta

SEQ ID NO: 159878 - DNA, 15 bp, Homo sapiens
attatcccaaactag

SEQ ID NO: 159879 - DNA, 15 bp, Homo sapiens
ttatcccaaactaga

SEQ ID NO: 159880 - DNA, 15 bp, Homo sapiens
tatcccaaactagaa

SEQ ID NO: 159881 - DNA, 15 bp, Homo sapiens
atcccaaactagaaa

SEQ ID NO: 159882 - DNA, 15 bp, Homo sapiens
tcccaaactagaaaa

SEQ ID NO: 159883 - DNA, 15 bp, Homo sapiens
cccaaactagaaaag

SEQ ID NO: 159884 - DNA, 15 bp, Homo sapiens
ccaaactagaaaaga

SEQ ID NO: 159885 - DNA, 15 bp, Homo sapiens
caaactagaaaagat

SEQ ID NO: 159886 - DNA, 15 bp, Homo sapiens
aaactagaaaagatg

SEQ ID NO: 159887 - DNA, 15 bp, Homo sapiens
aactagaaaagatga

SEQ ID NO: 159888 - DNA, 15 bp, Homo sapiens
actagaaaagatgac

SEQ ID NO: 159889 - DNA, 15 bp, Homo sapiens
ctagaaaagatgacg

SEQ ID NO: 159890 - DNA, 15 bp, Homo sapiens
tagaaaagatgacga

SEQ ID NO: 159891 - DNA, 15 bp, Homo sapiens
agaaaagatgacgag

SEQ ID NO: 159892 - DNA, 15 bp, Homo sapiens
gaaaagatgacgaga

SEQ ID NO: 159893 - DNA, 15 bp, Homo sapiens
aaaagatgacgagag

SEQ ID NO: 159894 - DNA, 15 bp, Homo sapiens
aaagatgacgagagg

SEQ ID NO: 159895 - DNA, 15 bp, Homo sapiens
aagatgacgagaggg

SEQ ID NO: 159896 - DNA, 15 bp, Homo sapiens
agatgacgagaggga

SEQ ID NO: 159897 - DNA, 15 bp, Homo sapiens
gatgacgagagggac

SEQ ID NO: 159898 - DNA, 15 bp, Homo sapiens
atgacgagagggact

SEQ ID NO: 159899 - DNA, 15 bp, Homo sapiens
tgacgagagggactg

SEQ ID NO: 159900 - DNA, 15 bp, Homo sapiens
gacgagagggactgt

SEQ ID NO: 159901 - DNA, 15 bp, Homo sapiens
acgagagggactgtg

SEQ ID NO: 159902 - DNA, 15 bp, Homo sapiens
cgagagggactgtga

SEQ ID NO: 159903 - DNA, 15 bp, Homo sapiens
gagagggactgtgaa

SEQ ID NO: 159904 - DNA, 15 bp, Homo sapiens
agagggactgtgaac

SEQ ID NO: 159905 - DNA, 15 bp, Homo sapiens
gagggactgtgaaca

SEQ ID NO: 159906 - DNA, 15 bp, Homo sapiens
agggactgtgaacat

SEQ ID NO: 159907 - DNA, 15 bp, Homo sapiens
gggactgtgaacatt

SEQ ID NO: 159908 - DNA, 15 bp, Homo sapiens
ggactgtgaacattc

SEQ ID NO: 159909 - DNA, 15 bp, Homo sapiens
gactgtgaacattca

SEQ ID NO: 159910 - DNA, 15 bp, Homo sapiens
actgtgaacattcag

SEQ ID NO: 159911 - DNA, 15 bp, Homo sapiens
ctgtgaacattcagt

SEQ ID NO: 159912 - DNA, 15 bp, Homo sapiens
tgtgaacattcagtt

SEQ ID NO: 159913 - DNA, 15 bp, Homo sapiens
gtgaacattcagttg

SEQ ID NO: 159914 - DNA, 15 bp, Homo sapiens
tgaacattcagttgt

SEQ ID NO: 159915 - DNA, 15 bp, Homo sapiens
gaacattcagttgtc

SEQ ID NO: 159916 - DNA, 15 bp, Homo sapiens
aacattcagttgtca

SEQ ID NO: 159917 - DNA, 15 bp, Homo sapiens
acattcagttgtcag

SEQ ID NO: 159918 - DNA, 15 bp, Homo sapiens
cattcagttgtcagc

SEQ ID NO: 159919 - DNA, 15 bp, Homo sapiens
attcagttgtcagct

SEQ ID NO: 159920 - DNA, 15 bp, Homo sapiens
ttcagttgtcagctt

SEQ ID NO: 159921 - DNA, 15 bp, Homo sapiens
tcagttgtcagcttc

SEQ ID NO: 159922 - DNA, 15 bp, Homo sapiens
cagttgtcagcttca

SEQ ID NO: 159923 - DNA, 15 bp, Homo sapiens
agttgtcagcttcaa

SEQ ID NO: 159924 - DNA, 15 bp, Homo sapiens
gttgtcagcttcaag

SEQ ID NO: 159925 - DNA, 15 bp, Homo sapiens
ttgtcagcttcaagg

SEQ ID NO: 159926 - DNA, 15 bp, Homo sapiens
tgtcagcttcaaggc

SEQ ID NO: 159927 - DNA, 15 bp, Homo sapiens
gtcagcttcaaggct

SEQ ID NO: 159928 - DNA, 15 bp, Homo sapiens
tcagcttcaaggctg

SEQ ID NO: 159929 - DNA, 15 bp, Homo sapiens
cagcttcaaggctga

SEQ ID NO: 159930 - DNA, 15 bp, Homo sapiens
agcttcaaggctgag

SEQ ID NO: 159931 - DNA, 15 bp, Homo sapiens
gcttcaaggctgagg

SEQ ID NO: 159932 - DNA, 15 bp, Homo sapiens
cttcaaggctgaggc

SEQ ID NO: 159933 - DNA, 15 bp, Homo sapiens
ttcaaggctgaggca

SEQ ID NO: 159934 - DNA, 15 bp, Homo sapiens
tcaaggctgaggcag

SEQ ID NO: 159935 - DNA, 15 bp, Homo sapiens
caaggctgaggcagc

SEQ ID NO: 159936 - DNA, 15 bp, Homo sapiens
aaggctgaggcagcc

SEQ ID NO: 159937 - DNA, 15 bp, Homo sapiens
aggctgaggcagcct

SEQ ID NO: 159938 - DNA, 15 bp, Homo sapiens
ggctgaggcagcctg

SEQ ID NO: 159939 - DNA, 15 bp, Homo sapiens
gctgaggcagcctgg

SEQ ID NO: 159940 - DNA, 15 bp, Homo sapiens
ctgaggcagcctggt

SEQ ID NO: 159941 - DNA, 15 bp, Homo sapiens
tgaggcagcctggtc

SEQ ID NO: 159942 - DNA, 15 bp, Homo sapiens
gaggcagcctggtct

SEQ ID NO: 159943 - DNA, 15 bp, Homo sapiens
aggcagcctggtcta

SEQ ID NO: 159944 - DNA, 15 bp, Homo sapiens
ggcagcctggtctag

SEQ ID NO: 159945 - DNA, 15 bp, Homo sapiens
gcagcctggtctaga

SEQ ID NO: 159946 - DNA, 15 bp, Homo sapiens
cagcctggtctagaa

SEQ ID NO: 159947 - DNA, 15 bp, Homo sapiens
agcctggtctagaat

SEQ ID NO: 159948 - DNA, 15 bp, Homo sapiens
gcctggtctagaatg

SEQ ID NO: 159949 - DNA, 15 bp, Homo sapiens
cctggtctagaatga

SEQ ID NO: 159950 - DNA, 15 bp, Homo sapiens
ctggtctagaatgaa

SEQ ID NO: 159951 - DNA, 15 bp, Homo sapiens
tggtctagaatgaaa

SEQ ID NO: 159952 - DNA, 15 bp, Homo sapiens
ggtctagaatgaaaa

SEQ ID NO: 159953 - DNA, 15 bp, Homo sapiens
gtctagaatgaaaat

SEQ ID NO: 159954 - DNA, 15 bp, Homo sapiens
tctagaatgaaaata

SEQ ID NO: 159955 - DNA, 15 bp, Homo sapiens
ctagaatgaaaatag

SEQ ID NO: 159956 - DNA, 15 bp, Homo sapiens
tagaatgaaaataga

SEQ ID NO: 159957 - DNA, 15 bp, Homo sapiens
agaatgaaaatagaa

SEQ ID NO: 159958 - DNA, 15 bp, Homo sapiens
gaatgaaaatagaaa

SEQ ID NO: 159959 - DNA, 15 bp, Homo sapiens
aatgaaaatagaaat

SEQ ID NO: 159960 - DNA, 15 bp, Homo sapiens
atgaaaatagaaatg

SEQ ID NO: 159961 - DNA, 15 bp, Homo sapiens
tgaaaatagaaatgg

SEQ ID NO: 159962 - DNA, 15 bp, Homo sapiens
gaaaatagaaatgga

SEQ ID NO: 159963 - DNA, 15 bp, Homo sapiens
aaaatagaaatggat

SEQ ID NO: 159964 - DNA, 15 bp, Homo sapiens
aaatagaaatggatt

SEQ ID NO: 159965 - DNA, 15 bp, Homo sapiens
aatagaaatggattc

SEQ ID NO: 159966 - DNA, 15 bp, Homo sapiens
atagaaatggattca

SEQ ID NO: 159967 - DNA, 15 bp, Homo sapiens
tagaaatggattcaa

SEQ ID NO: 159968 - DNA, 15 bp, Homo sapiens
agaaatggattcaac

SEQ ID NO: 159969 - DNA, 15 bp, Homo sapiens
gaaatggattcaacg

SEQ ID NO: 159970 - DNA, 15 bp, Homo sapiens
aaatggattcaacgt

SEQ ID NO: 159971 - DNA, 15 bp, Homo sapiens
aatggattcaacgtc

SEQ ID NO: 159972 - DNA, 15 bp, Homo sapiens
atggattcaacgtca

SEQ ID NO: 159973 - DNA, 15 bp, Homo sapiens
tggattcaacgtcaa

SEQ ID NO: 159974 - DNA, 15 bp, Homo sapiens
ggattcaacgtcaaa

SEQ ID NO: 159975 - DNA, 15 bp, Homo sapiens
gattcaacgtcaaat

SEQ ID NO: 159976 - DNA, 15 bp, Homo sapiens
attcaacgtcaaatt

SEQ ID NO: 159977 - DNA, 15 bp, Homo sapiens
ttcaacgtcaaattt

SEQ ID NO: 159978 - DNA, 15 bp, Homo sapiens
tcaacgtcaaatttt

SEQ ID NO: 159979 - DNA, 15 bp, Homo sapiens
caacgtcaaattttg

SEQ ID NO: 159980 - DNA, 15 bp, Homo sapiens
aacgtcaaattttgc

SEQ ID NO: 159981 - DNA, 15 bp, Homo sapiens
acgtcaaattttgcc

SEQ ID NO: 159982 - DNA, 15 bp, Homo sapiens
cgtcaaattttgcca

SEQ ID NO: 159983 - DNA, 15 bp, Homo sapiens
gtcaaattttgccac

SEQ ID NO: 159984 - DNA, 15 bp, Homo sapiens
tcaaattttgccact

SEQ ID NO: 159985 - DNA, 15 bp, Homo sapiens
caaattttgccactt

SEQ ID NO: 159986 - DNA, 15 bp, Homo sapiens
aaattttgccactta

SEQ ID NO: 159987 - DNA, 15 bp, Homo sapiens
aattttgccacttag

SEQ ID NO: 159988 - DNA, 15 bp, Homo sapiens
attttgccacttagt

SEQ ID NO: 159989 - DNA, 15 bp, Homo sapiens
ttttgccacttagta

SEQ ID NO: 159990 - DNA, 15 bp, Homo sapiens
tttgccacttagtag

SEQ ID NO: 159991 - DNA, 15 bp, Homo sapiens
ttgccacttagtagc

SEQ ID NO: 159992 - DNA, 15 bp, Homo sapiens
tgccacttagtagca

SEQ ID NO: 159993 - DNA, 15 bp, Homo sapiens
gccacttagtagcaa

SEQ ID NO: 159994 - DNA, 15 bp, Homo sapiens
ccacttagtagcaac

SEQ ID NO: 159995 - DNA, 15 bp, Homo sapiens
cacttagtagcaact

SEQ ID NO: 159996 - DNA, 15 bp, Homo sapiens
acttagtagcaactt

SEQ ID NO: 159997 - DNA, 15 bp, Homo sapiens
cttagtagcaacttg

SEQ ID NO: 159998 - DNA, 15 bp, Homo sapiens
ttagtagcaacttga

SEQ ID NO: 159999 - DNA, 15 bp, Homo sapiens
tagtagcaacttgac

SEQ ID NO: 160000 - DNA, 15 bp, Homo sapiens
agtagcaacttgacc

SEQ ID NO: 160001 - DNA, 15 bp, Homo sapiens
gtagcaacttgacca

SEQ ID NO: 160002 - DNA, 15 bp, Homo sapiens
tagcaacttgaccag

SEQ ID NO: 160003 - DNA, 15 bp, Homo sapiens
agcaacttgaccagg

SEQ ID NO: 160004 - DNA, 15 bp, Homo sapiens
gcaacttgaccaggt

SEQ ID NO: 160005 - DNA, 15 bp, Homo sapiens
caacttgaccaggta

SEQ ID NO: 160006 - DNA, 15 bp, Homo sapiens
aacttgaccaggtaa

SEQ ID NO: 160007 - DNA, 15 bp, Homo sapiens
acttgaccaggtaac

SEQ ID NO: 160008 - DNA, 15 bp, Homo sapiens
cttgaccaggtaact

SEQ ID NO: 160009 - DNA, 15 bp, Homo sapiens
ttgaccaggtaactg

SEQ ID NO: 160010 - DNA, 15 bp, Homo sapiens
tgaccaggtaactgg

SEQ ID NO: 160011 - DNA, 15 bp, Homo sapiens
gaccaggtaactggt

SEQ ID NO: 160012 - DNA, 15 bp, Homo sapiens
accaggtaactggtt

SEQ ID NO: 160013 - DNA, 15 bp, Homo sapiens
ccaggtaactggtta

SEQ ID NO: 160014 - DNA, 15 bp, Homo sapiens
caggtaactggttat

SEQ ID NO: 160015 - DNA, 15 bp, Homo sapiens
aggtaactggttatc

SEQ ID NO: 160016 - DNA, 15 bp, Homo sapiens
ggtaactggttatcc

SEQ ID NO: 160017 - DNA, 15 bp, Homo sapiens
gtaactggttatcct

SEQ ID NO: 160018 - DNA, 15 bp, Homo sapiens
taactggttatcctt

SEQ ID NO: 160019 - DNA, 15 bp, Homo sapiens
aactggttatccttt

SEQ ID NO: 160020 - DNA, 15 bp, Homo sapiens
actggttatcctttt

SEQ ID NO: 160021 - DNA, 15 bp, Homo sapiens
ctggttatcctttta

SEQ ID NO: 160022 - DNA, 15 bp, Homo sapiens
tggttatccttttaa

SEQ ID NO: 160023 - DNA, 15 bp, Homo sapiens
ggttatccttttaaa

SEQ ID NO: 160024 - DNA, 15 bp, Homo sapiens
gttatccttttaaag

SEQ ID NO: 160025 - DNA, 15 bp, Homo sapiens
ttatccttttaaagc

SEQ ID NO: 160026 - DNA, 15 bp, Homo sapiens
tatccttttaaagcc

SEQ ID NO: 160027 - DNA, 15 bp, Homo sapiens
atccttttaaagcct

SEQ ID NO: 160028 - DNA, 15 bp, Homo sapiens
tccttttaaagcctt

SEQ ID NO: 160029 - DNA, 15 bp, Homo sapiens
ccttttaaagcctta

SEQ ID NO: 160030 - DNA, 15 bp, Homo sapiens
cttttaaagccttag

SEQ ID NO: 160031 - DNA, 15 bp, Homo sapiens
ttttaaagccttagt

SEQ ID NO: 160032 - DNA, 15 bp, Homo sapiens
tttaaagccttagtt

SEQ ID NO: 160033 - DNA, 15 bp, Homo sapiens
ttaaagccttagttt

SEQ ID NO: 160034 - DNA, 15 bp, Homo sapiens
taaagccttagttta

SEQ ID NO: 160035 - DNA, 15 bp, Homo sapiens
aaagccttagtttat

SEQ ID NO: 160036 - DNA, 15 bp, Homo sapiens
aagccttagtttatc

SEQ ID NO: 160037 - DNA, 15 bp, Homo sapiens
agccttagtttatct

SEQ ID NO: 160038 - DNA, 15 bp, Homo sapiens
gccttagtttatcta

SEQ ID NO: 160039 - DNA, 15 bp, Homo sapiens
ccttagtttatctaa

SEQ ID NO: 160040 - DNA, 15 bp, Homo sapiens
cttagtttatctaaa

SEQ ID NO: 160041 - DNA, 15 bp, Homo sapiens
ttagtttatctaaat

SEQ ID NO: 160042 - DNA, 15 bp, Homo sapiens
tagtttatctaaatt

SEQ ID NO: 160043 - DNA, 15 bp, Homo sapiens
agtttatctaaattg

SEQ ID NO: 160044 - DNA, 15 bp, Homo sapiens
gtttatctaaattgt

SEQ ID NO: 160045 - DNA, 15 bp, Homo sapiens
tttatctaaattgtg

SEQ ID NO: 160046 - DNA, 15 bp, Homo sapiens
ttatctaaattgtga

SEQ ID NO: 160047 - DNA, 15 bp, Homo sapiens
tatctaaattgtgat

SEQ ID NO: 160048 - DNA, 15 bp, Homo sapiens
atctaaattgtgata

SEQ ID NO: 160049 - DNA, 15 bp, Homo sapiens
tctaaattgtgatat

SEQ ID NO: 160050 - DNA, 15 bp, Homo sapiens
ctaaattgtgatatt

SEQ ID NO: 160051 - DNA, 15 bp, Homo sapiens
taaattgtgatatta

SEQ ID NO: 160052 - DNA, 15 bp, Homo sapiens
aaattgtgatattaa

SEQ ID NO: 160053 - DNA, 15 bp, Homo sapiens
aattgtgatattaat

SEQ ID NO: 160054 - DNA, 15 bp, Homo sapiens
attgtgatattaatg

SEQ ID NO: 160055 - DNA, 15 bp, Homo sapiens
ttgtgatattaatgt

SEQ ID NO: 160056 - DNA, 15 bp, Homo sapiens
tgtgatattaatgtt

SEQ ID NO: 160057 - DNA, 15 bp, Homo sapiens
gtgatattaatgttg

SEQ ID NO: 160058 - DNA, 15 bp, Homo sapiens
tgatattaatgttgc

SEQ ID NO: 160059 - DNA, 15 bp, Homo sapiens
gatattaatgttgct

SEQ ID NO: 160060 - DNA, 15 bp, Homo sapiens
atattaatgttgctc

SEQ ID NO: 160061 - DNA, 15 bp, Homo sapiens
tattaatgttgctct

SEQ ID NO: 160062 - DNA, 15 bp, Homo sapiens
attaatgttgctctt

SEQ ID NO: 160063 - DNA, 15 bp, Homo sapiens
ttaatgttgctctta

SEQ ID NO: 160064 - DNA, 15 bp, Homo sapiens
taatgttgctcttat

SEQ ID NO: 160065 - DNA, 15 bp, Homo sapiens
aatgttgctcttata

SEQ ID NO: 160066 - DNA, 15 bp, Homo sapiens
atgttgctcttataa

SEQ ID NO: 160067 - DNA, 15 bp, Homo sapiens
tgttgctcttataag

SEQ ID NO: 160068 - DNA, 15 bp, Homo sapiens
gttgctcttataagt

SEQ ID NO: 160069 - DNA, 15 bp, Homo sapiens
ttgctcttataagtt

SEQ ID NO: 160070 - DNA, 15 bp, Homo sapiens
tgctcttataagttt

SEQ ID NO: 160071 - DNA, 15 bp, Homo sapiens
gctcttataagtttg

SEQ ID NO: 160072 - DNA, 15 bp, Homo sapiens
ctcttataagtttgt

SEQ ID NO: 160073 - DNA, 15 bp, Homo sapiens
tcttataagtttgtc

SEQ ID NO: 160074 - DNA, 15 bp, Homo sapiens
cttataagtttgtca

SEQ ID NO: 160075 - DNA, 15 bp, Homo sapiens
ttataagtttgtcat

SEQ ID NO: 160076 - DNA, 15 bp, Homo sapiens
tataagtttgtcatg

SEQ ID NO: 160077 - DNA, 15 bp, Homo sapiens
ataagtttgtcatga

SEQ ID NO: 160078 - DNA, 15 bp, Homo sapiens
taagtttgtcatgag

SEQ ID NO: 160079 - DNA, 15 bp, Homo sapiens
aagtttgtcatgagg

SEQ ID NO: 160080 - DNA, 15 bp, Homo sapiens
agtttgtcatgagga

SEQ ID NO: 160081 - DNA, 15 bp, Homo sapiens
gtttgtcatgaggac

SEQ ID NO: 160082 - DNA, 15 bp, Homo sapiens
tttgtcatgaggact

SEQ ID NO: 160083 - DNA, 15 bp, Homo sapiens
ttgtcatgaggacta

SEQ ID NO: 160084 - DNA, 15 bp, Homo sapiens
tgtcatgaggactaa

SEQ ID NO: 160085 - DNA, 15 bp, Homo sapiens
gtcatgaggactaaa

SEQ ID NO: 160086 - DNA, 15 bp, Homo sapiens
tcatgaggactaaat

SEQ ID NO: 160087 - DNA, 15 bp, Homo sapiens
catgaggactaaatt

SEQ ID NO: 160088 - DNA, 15 bp, Homo sapiens
atgaggactaaatta

SEQ ID NO: 160089 - DNA, 15 bp, Homo sapiens
tgaggactaaattaa

SEQ ID NO: 160090 - DNA, 15 bp, Homo sapiens
gaggactaaattaaa

SEQ ID NO: 160091 - DNA, 15 bp, Homo sapiens
aggactaaattaaat

SEQ ID NO: 160092 - DNA, 15 bp, Homo sapiens
ggactaaattaaatg

SEQ ID NO: 160093 - DNA, 15 bp, Homo sapiens
gactaaattaaatgg

SEQ ID NO: 160094 - DNA, 15 bp, Homo sapiens
actaaattaaatggt

SEQ ID NO: 160095 - DNA, 15 bp, Homo sapiens
ctaaattaaatggtg

SEQ ID NO: 160096 - DNA, 15 bp, Homo sapiens
taaattaaatggtgt

SEQ ID NO: 160097 - DNA, 15 bp, Homo sapiens
aaattaaatggtgta

SEQ ID NO: 160098 - DNA, 15 bp, Homo sapiens
aattaaatggtgtac

SEQ ID NO: 160099 - DNA, 15 bp, Homo sapiens
attaaatggtgtaca

SEQ ID NO: 160100 - DNA, 15 bp, Homo sapiens
ttaaatggtgtacat

SEQ ID NO: 160101 - DNA, 15 bp, Homo sapiens
taaatggtgtacata

SEQ ID NO: 160102 - DNA, 15 bp, Homo sapiens
aaatggtgtacatag

SEQ ID NO: 160103 - DNA, 15 bp, Homo sapiens
aatggtgtacataga

SEQ ID NO: 160104 - DNA, 15 bp, Homo sapiens
atggtgtacatagag

SEQ ID NO: 160105 - DNA, 15 bp, Homo sapiens
tggtgtacatagagt

SEQ ID NO: 160106 - DNA, 15 bp, Homo sapiens
ggtgtacatagagtg

SEQ ID NO: 160107 - DNA, 15 bp, Homo sapiens
gtgtacatagagtgc

SEQ ID NO: 160108 - DNA, 15 bp, Homo sapiens
tgtacatagagtgcc

SEQ ID NO: 160109 - DNA, 15 bp, Homo sapiens
gtacatagagtgcct

SEQ ID NO: 160110 - DNA, 15 bp, Homo sapiens
tacatagagtgcctt

SEQ ID NO: 160111 - DNA, 15 bp, Homo sapiens
acatagagtgccttg

SEQ ID NO: 160112 - DNA, 15 bp, Homo sapiens
catagagtgccttgg

SEQ ID NO: 160113 - DNA, 15 bp, Homo sapiens
atagagtgccttggg

SEQ ID NO: 160114 - DNA, 15 bp, Homo sapiens
tagagtgccttgggt

SEQ ID NO: 160115 - DNA, 15 bp, Homo sapiens
agagtgccttgggta

SEQ ID NO: 160116 - DNA, 15 bp, Homo sapiens
gagtgccttgggtac

SEQ ID NO: 160117 - DNA, 15 bp, Homo sapiens
agtgccttgggtact

SEQ ID NO: 160118 - DNA, 15 bp, Homo sapiens
gtgccttgggtactc

SEQ ID NO: 160119 - DNA, 15 bp, Homo sapiens
tgccttgggtactct

SEQ ID NO: 160120 - DNA, 15 bp, Homo sapiens
gccttgggtactctc

SEQ ID NO: 160121 - DNA, 15 bp, Homo sapiens
ccttgggtactctct

SEQ ID NO: 160122 - DNA, 15 bp, Homo sapiens
cttgggtactctctg

SEQ ID NO: 160123 - DNA, 15 bp, Homo sapiens
ttgggtactctctga

SEQ ID NO: 160124 - DNA, 15 bp, Homo sapiens
tgggtactctctgat

SEQ ID NO: 160125 - DNA, 15 bp, Homo sapiens
gggtactctctgatg

SEQ ID NO: 160126 - DNA, 15 bp, Homo sapiens
ggtactctctgatgg

SEQ ID NO: 160127 - DNA, 15 bp, Homo sapiens
gtactctctgatggg

SEQ ID NO: 160128 - DNA, 15 bp, Homo sapiens
tactctctgatgggg

SEQ ID NO: 160129 - DNA, 15 bp, Homo sapiens
actctctgatggggg

SEQ ID NO: 160130 - DNA, 15 bp, Homo sapiens
ctctctgatggggga

SEQ ID NO: 160131 - DNA, 15 bp, Homo sapiens
tctctgatgggggac

SEQ ID NO: 160132 - DNA, 15 bp, Homo sapiens
ctctgatgggggact

SEQ ID NO: 160133 - DNA, 15 bp, Homo sapiens
tctgatgggggactc

SEQ ID NO: 160134 - DNA, 15 bp, Homo sapiens
ctgatgggggactcc

SEQ ID NO: 160135 - DNA, 15 bp, Homo sapiens
tgatgggggactcca

SEQ ID NO: 160136 - DNA, 15 bp, Homo sapiens
gatgggggactccat

SEQ ID NO: 160137 - DNA, 15 bp, Homo sapiens
atgggggactccatg

SEQ ID NO: 160138 - DNA, 15 bp, Homo sapiens
tgggggactccatga

SEQ ID NO: 160139 - DNA, 15 bp, Homo sapiens
gggggactccatgat

SEQ ID NO: 160140 - DNA, 15 bp, Homo sapiens
ggggactccatgata

SEQ ID NO: 160141 - DNA, 15 bp, Homo sapiens
gggactccatgataa

SEQ ID NO: 160142 - DNA, 15 bp, Homo sapiens
ggactccatgataat

SEQ ID NO: 160143 - DNA, 15 bp, Homo sapiens
gactccatgataatt

SEQ ID NO: 160144 - DNA, 15 bp, Homo sapiens
actccatgataattt

SEQ ID NO: 160145 - DNA, 15 bp, Homo sapiens
ctccatgataatttg

SEQ ID NO: 160146 - DNA, 15 bp, Homo sapiens
tccatgataatttgt

SEQ ID NO: 160147 - DNA, 15 bp, Homo sapiens
ccatgataatttgtg

SEQ ID NO: 160148 - DNA, 15 bp, Homo sapiens
catgataatttgtgg

SEQ ID NO: 160149 - DNA, 15 bp, Homo sapiens
atgataatttgtggt

SEQ ID NO: 160150 - DNA, 15 bp, Homo sapiens
tgataatttgtggtc

SEQ ID NO: 160151 - DNA, 15 bp, Homo sapiens
gataatttgtggtct

SEQ ID NO: 160152 - DNA, 15 bp, Homo sapiens
ataatttgtggtctc

SEQ ID NO: 160153 - DNA, 15 bp, Homo sapiens
taatttgtggtctca

SEQ ID NO: 160154 - DNA, 15 bp, Homo sapiens
aatttgtggtctcat

SEQ ID NO: 160155 - DNA, 15 bp, Homo sapiens
atttgtggtctcatg

SEQ ID NO: 160156 - DNA, 15 bp, Homo sapiens
tttgtggtctcatgg

SEQ ID NO: 160157 - DNA, 15 bp, Homo sapiens
ttgtggtctcatgga

SEQ ID NO: 160158 - DNA, 15 bp, Homo sapiens
tgtggtctcatggag

SEQ ID NO: 160159 - DNA, 15 bp, Homo sapiens
gtggtctcatggagg

SEQ ID NO: 160160 - DNA, 15 bp, Homo sapiens
tggtctcatggaggg

SEQ ID NO: 160161 - DNA, 15 bp, Homo sapiens
ggtctcatggaggga

SEQ ID NO: 160162 - DNA, 15 bp, Homo sapiens
gtctcatggagggag

SEQ ID NO: 160163 - DNA, 15 bp, Homo sapiens
tctcatggagggagc

SEQ ID NO: 160164 - DNA, 15 bp, Homo sapiens
ctcatggagggagct

SEQ ID NO: 160165 - DNA, 15 bp, Homo sapiens
tcatggagggagctc

SEQ ID NO: 160166 - DNA, 15 bp, Homo sapiens
catggagggagctct

SEQ ID NO: 160167 - DNA, 15 bp, Homo sapiens
atggagggagctctg

SEQ ID NO: 160168 - DNA, 15 bp, Homo sapiens
tggagggagctctgg

SEQ ID NO: 160169 - DNA, 15 bp, Homo sapiens
ggagggagctctggg

SEQ ID NO: 160170 - DNA, 15 bp, Homo sapiens
gagggagctctggga

SEQ ID NO: 160171 - DNA, 15 bp, Homo sapiens
agggagctctgggaa

SEQ ID NO: 160172 - DNA, 15 bp, Homo sapiens
gggagctctgggaag

SEQ ID NO: 160173 - DNA, 15 bp, Homo sapiens
ggagctctgggaagg

SEQ ID NO: 160174 - DNA, 15 bp, Homo sapiens
gagctctgggaaggt

SEQ ID NO: 160175 - DNA, 15 bp, Homo sapiens
agctctgggaaggtt

SEQ ID NO: 160176 - DNA, 15 bp, Homo sapiens
gctctgggaaggttt

SEQ ID NO: 160177 - DNA, 15 bp, Homo sapiens
ctctgggaaggttta

SEQ ID NO: 160178 - DNA, 15 bp, Homo sapiens
tctgggaaggtttag

SEQ ID NO: 160179 - DNA, 15 bp, Homo sapiens
ctgggaaggtttagg

SEQ ID NO: 160180 - DNA, 15 bp, Homo sapiens
tgggaaggtttagga

SEQ ID NO: 160181 - DNA, 15 bp, Homo sapiens
gggaaggtttaggag

SEQ ID NO: 160182 - DNA, 15 bp, Homo sapiens
ggaaggtttaggagc

SEQ ID NO: 160183 - DNA, 15 bp, Homo sapiens
gaaggtttaggagcc

SEQ ID NO: 160184 - DNA, 15 bp, Homo sapiens
aaggtttaggagcct

SEQ ID NO: 160185 - DNA, 15 bp, Homo sapiens
aggtttaggagcctg

SEQ ID NO: 160186 - DNA, 15 bp, Homo sapiens
ggtttaggagcctgc

SEQ ID NO: 160187 - DNA, 15 bp, Homo sapiens
gtttaggagcctgcc

SEQ ID NO: 160188 - DNA, 15 bp, Homo sapiens
tttaggagcctgcct

SEQ ID NO: 160189 - DNA, 15 bp, Homo sapiens
ttaggagcctgcctt

SEQ ID NO: 160190 - DNA, 15 bp, Homo sapiens
taggagcctgccttg

SEQ ID NO: 160191 - DNA, 15 bp, Homo sapiens
aggagcctgccttgg

SEQ ID NO: 160192 - DNA, 15 bp, Homo sapiens
ggagcctgccttggc

SEQ ID NO: 160193 - DNA, 15 bp, Homo sapiens
gagcctgccttggct

SEQ ID NO: 160194 - DNA, 15 bp, Homo sapiens
agcctgccttggctc

SEQ ID NO: 160195 - DNA, 15 bp, Homo sapiens
gcctgccttggctct

SEQ ID NO: 160196 - DNA, 15 bp, Homo sapiens
cctgccttggctctg

SEQ ID NO: 160197 - DNA, 15 bp, Homo sapiens
ctgccttggctctgc

SEQ ID NO: 160198 - DNA, 15 bp, Homo sapiens
tgccttggctctgca

SEQ ID NO: 160199 - DNA, 15 bp, Homo sapiens
gccttggctctgcag

SEQ ID NO: 160200 - DNA, 15 bp, Homo sapiens
ccttggctctgcagc

SEQ ID NO: 160201 - DNA, 15 bp, Homo sapiens
cttggctctgcagcc

SEQ ID NO: 160202 - DNA, 15 bp, Homo sapiens
ttggctctgcagcct

SEQ ID NO: 160203 - DNA, 15 bp, Homo sapiens
tggctctgcagcctt

SEQ ID NO: 160204 - DNA, 15 bp, Homo sapiens
ggctctgcagccttg

SEQ ID NO: 160205 - DNA, 15 bp, Homo sapiens
gctctgcagccttgg

SEQ ID NO: 160206 - DNA, 15 bp, Homo sapiens
ctctgcagccttggg

SEQ ID NO: 160207 - DNA, 15 bp, Homo sapiens
tctgcagccttggga

SEQ ID NO: 160208 - DNA, 15 bp, Homo sapiens
ctgcagccttgggag

SEQ ID NO: 160209 - DNA, 15 bp, Homo sapiens
tgcagccttgggaga

SEQ ID NO: 160210 - DNA, 15 bp, Homo sapiens
gcagccttgggagag

SEQ ID NO: 160211 - DNA, 15 bp, Homo sapiens
cagccttgggagagc

SEQ ID NO: 160212 - DNA, 15 bp, Homo sapiens
agccttgggagagcc

SEQ ID NO: 160213 - DNA, 15 bp, Homo sapiens
gccttgggagagcct

SEQ ID NO: 160214 - DNA, 15 bp, Homo sapiens
ccttgggagagcctt

SEQ ID NO: 160215 - DNA, 15 bp, Homo sapiens
cttgggagagccttc

SEQ ID NO: 160216 - DNA, 15 bp, Homo sapiens
ttgggagagccttct

SEQ ID NO: 160217 - DNA, 15 bp, Homo sapiens
tgggagagccttcta

SEQ ID NO: 160218 - DNA, 15 bp, Homo sapiens
gggagagccttctag

SEQ ID NO: 160219 - DNA, 15 bp, Homo sapiens
ggagagccttctagc

SEQ ID NO: 160220 - DNA, 15 bp, Homo sapiens
gagagccttctagct

SEQ ID NO: 160221 - DNA, 15 bp, Homo sapiens
agagccttctagctt

SEQ ID NO: 160222 - DNA, 15 bp, Homo sapiens
gagccttctagcttc

SEQ ID NO: 160223 - DNA, 15 bp, Homo sapiens
agccttctagcttcc

SEQ ID NO: 160224 - DNA, 15 bp, Homo sapiens
gccttctagcttccc

SEQ ID NO: 160225 - DNA, 15 bp, Homo sapiens
ccttctagcttccca

SEQ ID NO: 160226 - DNA, 15 bp, Homo sapiens
cttctagcttcccag

SEQ ID NO: 160227 - DNA, 15 bp, Homo sapiens
ttctagcttcccagg

SEQ ID NO: 160228 - DNA, 15 bp, Homo sapiens
tctagcttcccagga

SEQ ID NO: 160229 - DNA, 15 bp, Homo sapiens
ctagcttcccaggac

SEQ ID NO: 160230 - DNA, 15 bp, Homo sapiens
tagcttcccaggaca

SEQ ID NO: 160231 - DNA, 15 bp, Homo sapiens
agcttcccaggacat

SEQ ID NO: 160232 - DNA, 15 bp, Homo sapiens
gcttcccaggacatg

SEQ ID NO: 160233 - DNA, 15 bp, Homo sapiens
cttcccaggacatgg

SEQ ID NO: 160234 - DNA, 15 bp, Homo sapiens
ttcccaggacatggc

SEQ ID NO: 160235 - DNA, 15 bp, Homo sapiens
tcccaggacatggca

SEQ ID NO: 160236 - DNA, 15 bp, Homo sapiens
cccaggacatggcag

SEQ ID NO: 160237 - DNA, 15 bp, Homo sapiens
ccaggacatggcagc

SEQ ID NO: 160238 - DNA, 15 bp, Homo sapiens
caggacatggcagcc

SEQ ID NO: 160239 - DNA, 15 bp, Homo sapiens
aggacatggcagcct

SEQ ID NO: 160240 - DNA, 15 bp, Homo sapiens
ggacatggcagccta

SEQ ID NO: 160241 - DNA, 15 bp, Homo sapiens
gacatggcagcctag

SEQ ID NO: 160242 - DNA, 15 bp, Homo sapiens
acatggcagcctagt

SEQ ID NO: 160243 - DNA, 15 bp, Homo sapiens
catggcagcctagtg

SEQ ID NO: 160244 - DNA, 15 bp, Homo sapiens
atggcagcctagtgt

SEQ ID NO: 160245 - DNA, 15 bp, Homo sapiens
tggcagcctagtgtt

SEQ ID NO: 160246 - DNA, 15 bp, Homo sapiens
ggcagcctagtgttg

SEQ ID NO: 160247 - DNA, 15 bp, Homo sapiens
gcagcctagtgttga

SEQ ID NO: 160248 - DNA, 15 bp, Homo sapiens
cagcctagtgttgaa

SEQ ID NO: 160249 - DNA, 15 bp, Homo sapiens
agcctagtgttgaat

SEQ ID NO: 160250 - DNA, 15 bp, Homo sapiens
gcctagtgttgaatg

SEQ ID NO: 160251 - DNA, 15 bp, Homo sapiens
cctagtgttgaatgc

SEQ ID NO: 160252 - DNA, 15 bp, Homo sapiens
ctagtgttgaatgct

SEQ ID NO: 160253 - DNA, 15 bp, Homo sapiens
tagtgttgaatgctt

SEQ ID NO: 160254 - DNA, 15 bp, Homo sapiens
agtgttgaatgcttg

SEQ ID NO: 160255 - DNA, 15 bp, Homo sapiens
gtgttgaatgcttgg

SEQ ID NO: 160256 - DNA, 15 bp, Homo sapiens
tgttgaatgcttggc

SEQ ID NO: 160257 - DNA, 15 bp, Homo sapiens
gttgaatgcttggct

SEQ ID NO: 160258 - DNA, 15 bp, Homo sapiens
ttgaatgcttggctc

SEQ ID NO: 160259 - DNA, 15 bp, Homo sapiens
tgaatgcttggctca

SEQ ID NO: 160260 - DNA, 15 bp, Homo sapiens
gaatgcttggctcag

SEQ ID NO: 160261 - DNA, 15 bp, Homo sapiens
aatgcttggctcagc

SEQ ID NO: 160262 - DNA, 15 bp, Homo sapiens
atgcttggctcagca

SEQ ID NO: 160263 - DNA, 15 bp, Homo sapiens
tgcttggctcagcaa

SEQ ID NO: 160264 - DNA, 15 bp, Homo sapiens
gcttggctcagcaaa

SEQ ID NO: 160265 - DNA, 15 bp, Homo sapiens
cttggctcagcaaat

SEQ ID NO: 160266 - DNA, 15 bp, Homo sapiens
ttggctcagcaaatg

SEQ ID NO: 160267 - DNA, 15 bp, Homo sapiens
tggctcagcaaatgt

SEQ ID NO: 160268 - DNA, 15 bp, Homo sapiens
ggctcagcaaatgtt

SEQ ID NO: 160269 - DNA, 15 bp, Homo sapiens
gctcagcaaatgttt

SEQ ID NO: 160270 - DNA, 15 bp, Homo sapiens
ctcagcaaatgtttg

SEQ ID NO: 160271 - DNA, 15 bp, Homo sapiens
agcaaatgtttgttc

SEQ ID NO: 160272 - DNA, 15 bp, Homo sapiens
gcaaatgtttgttct

SEQ ID NO: 160273 - DNA, 15 bp, Homo sapiens
caaatgtttgttctc

SEQ ID NO: 160274 - DNA, 15 bp, Homo sapiens
aaatgtttgttctcg

SEQ ID NO: 160275 - DNA, 15 bp, Homo sapiens
aatgtttgttctcgt

SEQ ID NO: 160276 - DNA, 15 bp, Homo sapiens
atgtttgttctcgtt

SEQ ID NO: 160277 - DNA, 15 bp, Homo sapiens
tgtttgttctcgttt

SEQ ID NO: 160278 - DNA, 15 bp, Homo sapiens
gtttgttctcgtttc

SEQ ID NO: 160279 - DNA, 15 bp, Homo sapiens
tttgttctcgtttcc

SEQ ID NO: 160280 - DNA, 15 bp, Homo sapiens
ttgttctcgtttcct

SEQ ID NO: 160281 - DNA, 15 bp, Homo sapiens
tgttctcgtttcctt

SEQ ID NO: 160282 - DNA, 15 bp, Homo sapiens
gttctcgtttccttc

SEQ ID NO: 160283 - DNA, 15 bp, Homo sapiens
ttctcgtttccttcc

SEQ ID NO: 160284 - DNA, 15 bp, Homo sapiens
tctcgtttccttccc

SEQ ID NO: 160285 - DNA, 15 bp, Homo sapiens
ctcgtttccttccca

SEQ ID NO: 160286 - DNA, 15 bp, Homo sapiens
tcgtttccttcccat

SEQ ID NO: 160287 - DNA, 15 bp, Homo sapiens
cgtttccttcccatc

SEQ ID NO: 160288 - DNA, 15 bp, Homo sapiens
gtttccttcccatca

SEQ ID NO: 160289 - DNA, 15 bp, Homo sapiens
tttccttcccatcaa

SEQ ID NO: 160290 - DNA, 15 bp, Homo sapiens
ttccttcccatcaac

SEQ ID NO: 160291 - DNA, 15 bp, Homo sapiens
tccttcccatcaact

SEQ ID NO: 160292 - DNA, 15 bp, Homo sapiens
ccttcccatcaactt

SEQ ID NO: 160293 - DNA, 15 bp, Homo sapiens
cttcccatcaacttg

SEQ ID NO: 160294 - DNA, 15 bp, Homo sapiens
ttcccatcaacttgg

SEQ ID NO: 160295 - DNA, 15 bp, Homo sapiens
tcccatcaacttggt

SEQ ID NO: 160296 - DNA, 15 bp, Homo sapiens
cccatcaacttggtc

SEQ ID NO: 160297 - DNA, 15 bp, Homo sapiens
ccatcaacttggtca

SEQ ID NO: 160298 - DNA, 15 bp, Homo sapiens
catcaacttggtcag

SEQ ID NO: 160299 - DNA, 15 bp, Homo sapiens
atcaacttggtcagt

SEQ ID NO: 160300 - DNA, 15 bp, Homo sapiens
tcaacttggtcagtt

SEQ ID NO: 160301 - DNA, 15 bp, Homo sapiens
caacttggtcagttg

SEQ ID NO: 160302 - DNA, 15 bp, Homo sapiens
aacttggtcagttgg

SEQ ID NO: 160303 - DNA, 15 bp, Homo sapiens
acttggtcagttggg

SEQ ID NO: 160304 - DNA, 15 bp, Homo sapiens
cttggtcagttgggg

SEQ ID NO: 160305 - DNA, 15 bp, Homo sapiens
ttggtcagttggggt

SEQ ID NO: 160306 - DNA, 15 bp, Homo sapiens
tggtcagttggggtc

SEQ ID NO: 160307 - DNA, 15 bp, Homo sapiens
ggtcagttggggtct

SEQ ID NO: 160308 - DNA, 15 bp, Homo sapiens
gtcagttggggtctt

SEQ ID NO: 160309 - DNA, 15 bp, Homo sapiens
tcagttggggtcttt

SEQ ID NO: 160310 - DNA, 15 bp, Homo sapiens
cagttggggtctttc

SEQ ID NO: 160311 - DNA, 15 bp, Homo sapiens
agttggggtctttca

SEQ ID NO: 160312 - DNA, 15 bp, Homo sapiens
gttggggtctttcag

SEQ ID NO: 160313 - DNA, 15 bp, Homo sapiens
ttggggtctttcagt

SEQ ID NO: 160314 - DNA, 15 bp, Homo sapiens
tggggtctttcagtt

SEQ ID NO: 160315 - DNA, 15 bp, Homo sapiens
ggggtctttcagtta

SEQ ID NO: 160316 - DNA, 15 bp, Homo sapiens
gggtctttcagttag

SEQ ID NO: 160317 - DNA, 15 bp, Homo sapiens
ggtctttcagttagg

SEQ ID NO: 160318 - DNA, 15 bp, Homo sapiens
gtctttcagttagga

SEQ ID NO: 160319 - DNA, 15 bp, Homo sapiens
tctttcagttaggag

SEQ ID NO: 160320 - DNA, 15 bp, Homo sapiens
ctttcagttaggagt

SEQ ID NO: 160321 - DNA, 15 bp, Homo sapiens
tttcagttaggagta

SEQ ID NO: 160322 - DNA, 15 bp, Homo sapiens
ttcagttaggagtat

SEQ ID NO: 160323 - DNA, 15 bp, Homo sapiens
tcagttaggagtatc

SEQ ID NO: 160324 - DNA, 15 bp, Homo sapiens
cagttaggagtatct

SEQ ID NO: 160325 - DNA, 15 bp, Homo sapiens
agttaggagtatctc

SEQ ID NO: 160326 - DNA, 15 bp, Homo sapiens
gttaggagtatctca

SEQ ID NO: 160327 - DNA, 15 bp, Homo sapiens
ttaggagtatctcag

SEQ ID NO: 160328 - DNA, 15 bp, Homo sapiens
taggagtatctcagt

SEQ ID NO: 160329 - DNA, 15 bp, Homo sapiens
aggagtatctcagtg

SEQ ID NO: 160330 - DNA, 15 bp, Homo sapiens
ggagtatctcagtga

SEQ ID NO: 160331 - DNA, 15 bp, Homo sapiens
gagtatctcagtgac

SEQ ID NO: 160332 - DNA, 15 bp, Homo sapiens
agtatctcagtgact

SEQ ID NO: 160333 - DNA, 15 bp, Homo sapiens
gtatctcagtgactt

SEQ ID NO: 160334 - DNA, 15 bp, Homo sapiens
tatctcagtgacttt

SEQ ID NO: 160335 - DNA, 15 bp, Homo sapiens
atctcagtgacttta

SEQ ID NO: 160336 - DNA, 15 bp, Homo sapiens
tctcagtgactttaa

SEQ ID NO: 160337 - DNA, 15 bp, Homo sapiens
ctcagtgactttaaa

SEQ ID NO: 160338 - DNA, 15 bp, Homo sapiens
tcagtgactttaaat

SEQ ID NO: 160339 - DNA, 15 bp, Homo sapiens
cagtgactttaaatg

SEQ ID NO: 160340 - DNA, 15 bp, Homo sapiens
agtgactttaaatgg

SEQ ID NO: 160341 - DNA, 15 bp, Homo sapiens
gtgactttaaatggc

SEQ ID NO: 160342 - DNA, 15 bp, Homo sapiens
tgactttaaatggca

SEQ ID NO: 160343 - DNA, 15 bp, Homo sapiens
gactttaaatggcat

SEQ ID NO: 160344 - DNA, 15 bp, Homo sapiens
actttaaatggcatg

SEQ ID NO: 160345 - DNA, 15 bp, Homo sapiens
ctttaaatggcatgg

SEQ ID NO: 160346 - DNA, 15 bp, Homo sapiens
tttaaatggcatggg

SEQ ID NO: 160347 - DNA, 15 bp, Homo sapiens
ttaaatggcatgggc

SEQ ID NO: 160348 - DNA, 15 bp, Homo sapiens
taaatggcatgggca

SEQ ID NO: 160349 - DNA, 15 bp, Homo sapiens
aaatggcatgggcat

SEQ ID NO: 160350 - DNA, 15 bp, Homo sapiens
aatggcatgggcatg

SEQ ID NO: 160351 - DNA, 15 bp, Homo sapiens
atggcatgggcatgc

SEQ ID NO: 160352 - DNA, 15 bp, Homo sapiens
tggcatgggcatgct

SEQ ID NO: 160353 - DNA, 15 bp, Homo sapiens
ggcatgggcatgctg

SEQ ID NO: 160354 - DNA, 15 bp, Homo sapiens
gcatgggcatgctgg

SEQ ID NO: 160355 - DNA, 15 bp, Homo sapiens
catgggcatgctgga

SEQ ID NO: 160356 - DNA, 15 bp, Homo sapiens
atgggcatgctggag

SEQ ID NO: 160357 - DNA, 15 bp, Homo sapiens
tgggcatgctggagt

SEQ ID NO: 160358 - DNA, 15 bp, Homo sapiens
gggcatgctggagtg

SEQ ID NO: 160359 - DNA, 15 bp, Homo sapiens
ggcatgctggagtga

SEQ ID NO: 160360 - DNA, 15 bp, Homo sapiens
gcatgctggagtgat

SEQ ID NO: 160361 - DNA, 15 bp, Homo sapiens
catgctggagtgata

SEQ ID NO: 160362 - DNA, 15 bp, Homo sapiens
atgctggagtgatag

SEQ ID NO: 160363 - DNA, 15 bp, Homo sapiens
tgctggagtgatagt

SEQ ID NO: 160364 - DNA, 15 bp, Homo sapiens
gctggagtgatagtg

SEQ ID NO: 160365 - DNA, 15 bp, Homo sapiens
ctggagtgatagtga

SEQ ID NO: 160366 - DNA, 15 bp, Homo sapiens
tggagtgatagtgac

SEQ ID NO: 160367 - DNA, 15 bp, Homo sapiens
ggagtgatagtgacc

SEQ ID NO: 160368 - DNA, 15 bp, Homo sapiens
gagtgatagtgacca

SEQ ID NO: 160369 - DNA, 15 bp, Homo sapiens
agtgatagtgaccat

SEQ ID NO: 160370 - DNA, 15 bp, Homo sapiens
gtgatagtgaccatg

SEQ ID NO: 160371 - DNA, 15 bp, Homo sapiens
tgatagtgaccatga

SEQ ID NO: 160372 - DNA, 15 bp, Homo sapiens
gatagtgaccatgag

SEQ ID NO: 160373 - DNA, 15 bp, Homo sapiens
atagtgaccatgagt

SEQ ID NO: 160374 - DNA, 15 bp, Homo sapiens
tagtgaccatgagtt

SEQ ID NO: 160375 - DNA, 15 bp, Homo sapiens
agtgaccatgagttt

SEQ ID NO: 160376 - DNA, 15 bp, Homo sapiens
gtgaccatgagtttc

SEQ ID NO: 160377 - DNA, 15 bp, Homo sapiens
tgaccatgagtttct

SEQ ID NO: 160378 - DNA, 15 bp, Homo sapiens
gaccatgagtttcta

SEQ ID NO: 160379 - DNA, 15 bp, Homo sapiens
accatgagtttctaa

SEQ ID NO: 160380 - DNA, 15 bp, Homo sapiens
ccatgagtttctaag

SEQ ID NO: 160381 - DNA, 15 bp, Homo sapiens
catgagtttctaaga

SEQ ID NO: 160382 - DNA, 15 bp, Homo sapiens
atgagtttctaagaa

SEQ ID NO: 160383 - DNA, 15 bp, Homo sapiens
tgagtttctaagaaa

SEQ ID NO: 160384 - DNA, 15 bp, Homo sapiens
gagtttctaagaaag

SEQ ID NO: 160385 - DNA, 15 bp, Homo sapiens
agtttctaagaaaga

SEQ ID NO: 160386 - DNA, 15 bp, Homo sapiens
gtttctaagaaagaa

SEQ ID NO: 160387 - DNA, 15 bp, Homo sapiens
tttctaagaaagaag

SEQ ID NO: 160388 - DNA, 15 bp, Homo sapiens
ttctaagaaagaagc

SEQ ID NO: 160389 - DNA, 15 bp, Homo sapiens
tctaagaaagaagca

SEQ ID NO: 160390 - DNA, 15 bp, Homo sapiens
ctaagaaagaagcat

SEQ ID NO: 160391 - DNA, 15 bp, Homo sapiens
taagaaagaagcata

SEQ ID NO: 160392 - DNA, 15 bp, Homo sapiens
aagaaagaagcataa

SEQ ID NO: 160393 - DNA, 15 bp, Homo sapiens
agaaagaagcataat

SEQ ID NO: 160394 - DNA, 15 bp, Homo sapiens
gaaagaagcataatt

SEQ ID NO: 160395 - DNA, 15 bp, Homo sapiens
aaagaagcataattt

SEQ ID NO: 160396 - DNA, 15 bp, Homo sapiens
aagaagcataatttc

SEQ ID NO: 160397 - DNA, 15 bp, Homo sapiens
agaagcataatttct

SEQ ID NO: 160398 - DNA, 15 bp, Homo sapiens
gaagcataatttctc

SEQ ID NO: 160399 - DNA, 15 bp, Homo sapiens
aagcataatttctcc

SEQ ID NO: 160400 - DNA, 15 bp, Homo sapiens
agcataatttctcca

SEQ ID NO: 160401 - DNA, 15 bp, Homo sapiens
gcataatttctccat

SEQ ID NO: 160402 - DNA, 15 bp, Homo sapiens
cataatttctccata

SEQ ID NO: 160403 - DNA, 15 bp, Homo sapiens
ataatttctccatat

SEQ ID NO: 160404 - DNA, 15 bp, Homo sapiens
taatttctccatatg

SEQ ID NO: 160405 - DNA, 15 bp, Homo sapiens
aatttctccatatgt

SEQ ID NO: 160406 - DNA, 15 bp, Homo sapiens
atttctccatatgtc

SEQ ID NO: 160407 - DNA, 15 bp, Homo sapiens
tttctccatatgtca

SEQ ID NO: 160408 - DNA, 15 bp, Homo sapiens
ttctccatatgtcat

SEQ ID NO: 160409 - DNA, 15 bp, Homo sapiens
tctccatatgtcatc

SEQ ID NO: 160410 - DNA, 15 bp, Homo sapiens
ctccatatgtcatcc

SEQ ID NO: 160411 - DNA, 15 bp, Homo sapiens
tccatatgtcatcca

SEQ ID NO: 160412 - DNA, 15 bp, Homo sapiens
ccatatgtcatccac

SEQ ID NO: 160413 - DNA, 15 bp, Homo sapiens
catatgtcatccaca

SEQ ID NO: 160414 - DNA, 15 bp, Homo sapiens
atatgtcatccacaa

SEQ ID NO: 160415 - DNA, 15 bp, Homo sapiens
tatgtcatccacaat

SEQ ID NO: 160416 - DNA, 15 bp, Homo sapiens
atgtcatccacaatt

SEQ ID NO: 160417 - DNA, 15 bp, Homo sapiens
tgtcatccacaattg

SEQ ID NO: 160418 - DNA, 15 bp, Homo sapiens
gtcatccacaattga

SEQ ID NO: 160419 - DNA, 15 bp, Homo sapiens
tcatccacaattgaa

SEQ ID NO: 160420 - DNA, 15 bp, Homo sapiens
catccacaattgaaa

SEQ ID NO: 160421 - DNA, 15 bp, Homo sapiens
atccacaattgaaat

SEQ ID NO: 160422 - DNA, 15 bp, Homo sapiens
tccacaattgaaata

SEQ ID NO: 160423 - DNA, 15 bp, Homo sapiens
ccacaattgaaatat

SEQ ID NO: 160424 - DNA, 15 bp, Homo sapiens
cacaattgaaatatt

SEQ ID NO: 160425 - DNA, 15 bp, Homo sapiens
acaattgaaatatta

SEQ ID NO: 160426 - DNA, 15 bp, Homo sapiens
caattgaaatattat

SEQ ID NO: 160427 - DNA, 15 bp, Homo sapiens
aattgaaatattatt

SEQ ID NO: 160428 - DNA, 15 bp, Homo sapiens
attgaaatattattg

SEQ ID NO: 160429 - DNA, 15 bp, Homo sapiens
ttgaaatattattgt

SEQ ID NO: 160430 - DNA, 15 bp, Homo sapiens
tgaaatattattgtt

SEQ ID NO: 160431 - DNA, 15 bp, Homo sapiens
gaaatattattgtta

SEQ ID NO: 160432 - DNA, 15 bp, Homo sapiens
aaatattattgttaa

SEQ ID NO: 160433 - DNA, 15 bp, Homo sapiens
aatattattgttaat

SEQ ID NO: 160434 - DNA, 15 bp, Homo sapiens
atattattgttaatt

SEQ ID NO: 160435 - DNA, 15 bp, Homo sapiens
tattattgttaattg

SEQ ID NO: 160436 - DNA, 15 bp, Homo sapiens
attattgttaattga

SEQ ID NO: 160437 - DNA, 15 bp, Homo sapiens
ttattgttaattgaa

SEQ ID NO: 160438 - DNA, 15 bp, Homo sapiens
tattgttaattgaaa

SEQ ID NO: 160439 - DNA, 15 bp, Homo sapiens
attgttaattgaaaa

SEQ ID NO: 160440 - DNA, 15 bp, Homo sapiens
ttgttaattgaaaaa

SEQ ID NO: 160441 - DNA, 15 bp, Homo sapiens
tgttaattgaaaaag

SEQ ID NO: 160442 - DNA, 15 bp, Homo sapiens
gttaattgaaaaagc

SEQ ID NO: 160443 - DNA, 15 bp, Homo sapiens
ttaattgaaaaagct

SEQ ID NO: 160444 - DNA, 15 bp, Homo sapiens
taattgaaaaagctt

SEQ ID NO: 160445 - DNA, 15 bp, Homo sapiens
aattgaaaaagcttc

SEQ ID NO: 160446 - DNA, 15 bp, Homo sapiens
attgaaaaagcttct

SEQ ID NO: 160447 - DNA, 15 bp, Homo sapiens
ttgaaaaagcttcta

SEQ ID NO: 160448 - DNA, 15 bp, Homo sapiens
tgaaaaagcttctag

SEQ ID NO: 160449 - DNA, 15 bp, Homo sapiens
gaaaaagcttctagg

SEQ ID NO: 160450 - DNA, 15 bp, Homo sapiens
aaaaagcttctaggc

SEQ ID NO: 160451 - DNA, 15 bp, Homo sapiens
aaaagcttctaggcc

SEQ ID NO: 160452 - DNA, 15 bp, Homo sapiens
aaagcttctaggcca

SEQ ID NO: 160453 - DNA, 15 bp, Homo sapiens
aagcttctaggccag

SEQ ID NO: 160454 - DNA, 15 bp, Homo sapiens
agcttctaggccagg

SEQ ID NO: 160455 - DNA, 15 bp, Homo sapiens
gcttctaggccaggc

SEQ ID NO: 160456 - DNA, 15 bp, Homo sapiens
cttctaggccaggca

SEQ ID NO: 160457 - DNA, 15 bp, Homo sapiens
ttctaggccaggcac

SEQ ID NO: 160458 - DNA, 15 bp, Homo sapiens
tctaggccaggcacg

SEQ ID NO: 160459 - DNA, 15 bp, Homo sapiens
ctaggccaggcacgg

SEQ ID NO: 160460 - DNA, 15 bp, Homo sapiens
taggccaggcacggt

SEQ ID NO: 160461 - DNA, 15 bp, Homo sapiens
aggccaggcacggtg

SEQ ID NO: 160462 - DNA, 15 bp, Homo sapiens
ggccaggcacggtgg

SEQ ID NO: 160463 - DNA, 15 bp, Homo sapiens
gccaggcacggtggc

SEQ ID NO: 160464 - DNA, 15 bp, Homo sapiens
ccaggcacggtggct

SEQ ID NO: 160465 - DNA, 15 bp, Homo sapiens
caggcacggtggctc

SEQ ID NO: 160466 - DNA, 15 bp, Homo sapiens
aggcacggtggctca

SEQ ID NO: 160467 - DNA, 15 bp, Homo sapiens
aatcccagcacttta

SEQ ID NO: 160468 - DNA, 15 bp, Homo sapiens
atcccagcactttag

SEQ ID NO: 160469 - DNA, 15 bp, Homo sapiens
tcccagcactttagg

SEQ ID NO: 160470 - DNA, 15 bp, Homo sapiens
cccagcactttagga

SEQ ID NO: 160471 - DNA, 15 bp, Homo sapiens
ccagcactttaggag

SEQ ID NO: 160472 - DNA, 15 bp, Homo sapiens
cagcactttaggagg

SEQ ID NO: 160473 - DNA, 15 bp, Homo sapiens
agcactttaggaggc

SEQ ID NO: 160474 - DNA, 15 bp, Homo sapiens
gcactttaggaggcc

SEQ ID NO: 160475 - DNA, 15 bp, Homo sapiens
cactttaggaggcca

SEQ ID NO: 160476 - DNA, 15 bp, Homo sapiens
actttaggaggccaa

SEQ ID NO: 160477 - DNA, 15 bp, Homo sapiens
ctttaggaggccaag

SEQ ID NO: 160478 - DNA, 15 bp, Homo sapiens
tttaggaggccaagg

SEQ ID NO: 160479 - DNA, 15 bp, Homo sapiens
ttaggaggccaaggc

SEQ ID NO: 160480 - DNA, 15 bp, Homo sapiens
taggaggccaaggcg

SEQ ID NO: 160481 - DNA, 15 bp, Homo sapiens
aggaggccaaggcgg

SEQ ID NO: 160482 - DNA, 15 bp, Homo sapiens
gaggccaaggcgggt

SEQ ID NO: 160483 - DNA, 15 bp, Homo sapiens
aggccaaggcgggtg

SEQ ID NO: 160484 - DNA, 15 bp, Homo sapiens
ggccaaggcgggtgg

SEQ ID NO: 160485 - DNA, 15 bp, Homo sapiens
gccaaggcgggtgga

SEQ ID NO: 160486 - DNA, 15 bp, Homo sapiens
ccaaggcgggtggat

SEQ ID NO: 160487 - DNA, 15 bp, Homo sapiens
caaggcgggtggatc

SEQ ID NO: 160488 - DNA, 15 bp, Homo sapiens
gcgggtggatcactt

SEQ ID NO: 160489 - DNA, 15 bp, Homo sapiens
cgggtggatcacttg

SEQ ID NO: 160490 - DNA, 15 bp, Homo sapiens
cctggccaacatggg

SEQ ID NO: 160491 - DNA, 15 bp, Homo sapiens
ctggccaacatgggg

SEQ ID NO: 160492 - DNA, 15 bp, Homo sapiens
tggccaacatgggga

SEQ ID NO: 160493 - DNA, 15 bp, Homo sapiens
ggccaacatggggaa

SEQ ID NO: 160494 - DNA, 15 bp, Homo sapiens
gccaacatggggaaa

SEQ ID NO: 160495 - DNA, 15 bp, Homo sapiens
ccaacatggggaaac

SEQ ID NO: 160496 - DNA, 15 bp, Homo sapiens
caacatggggaaacc

SEQ ID NO: 160497 - DNA, 15 bp, Homo sapiens
aacatggggaaaccc

SEQ ID NO: 160498 - DNA, 15 bp, Homo sapiens
acatggggaaaccct

SEQ ID NO: 160499 - DNA, 15 bp, Homo sapiens
catggggaaaccctg

SEQ ID NO: 160500 - DNA, 15 bp, Homo sapiens
atggggaaaccctgt

SEQ ID NO: 160501 - DNA, 15 bp, Homo sapiens
tggggaaaccctgtc

SEQ ID NO: 160502 - DNA, 15 bp, Homo sapiens
ggggaaaccctgtct

SEQ ID NO: 160503 - DNA, 15 bp, Homo sapiens
gggaaaccctgtctc

SEQ ID NO: 160504 - DNA, 15 bp, Homo sapiens
ggaaaccctgtctct

SEQ ID NO: 160505 - DNA, 15 bp, Homo sapiens
ctaaaaatacaaaat

SEQ ID NO: 160506 - DNA, 15 bp, Homo sapiens
taaaaatacaaaata

SEQ ID NO: 160507 - DNA, 15 bp, Homo sapiens
aaaaatacaaaataa

SEQ ID NO: 160508 - DNA, 15 bp, Homo sapiens
aaaatacaaaataag

SEQ ID NO: 160509 - DNA, 15 bp, Homo sapiens
aaatacaaaataagc

SEQ ID NO: 160510 - DNA, 15 bp, Homo sapiens
aatacaaaataagct

SEQ ID NO: 160511 - DNA, 15 bp, Homo sapiens
atacaaaataagctg

SEQ ID NO: 160512 - DNA, 15 bp, Homo sapiens
tacaaaataagctgg

SEQ ID NO: 160513 - DNA, 15 bp, Homo sapiens
acaaaataagctggg

SEQ ID NO: 160514 - DNA, 15 bp, Homo sapiens
caaaataagctgggc

SEQ ID NO: 160515 - DNA, 15 bp, Homo sapiens
aaaataagctgggcg

SEQ ID NO: 160516 - DNA, 15 bp, Homo sapiens
aaataagctgggcgt

SEQ ID NO: 160517 - DNA, 15 bp, Homo sapiens
aataagctgggcgtg

SEQ ID NO: 160518 - DNA, 15 bp, Homo sapiens
ataagctgggcgtgg

SEQ ID NO: 160519 - DNA, 15 bp, Homo sapiens
taagctgggcgtggt

SEQ ID NO: 160520 - DNA, 15 bp, Homo sapiens
aagctgggcgtggtg

SEQ ID NO: 160521 - DNA, 15 bp, Homo sapiens
gggcgtggtggtgcg

SEQ ID NO: 160522 - DNA, 15 bp, Homo sapiens
ggcgtggtggtgcgt

SEQ ID NO: 160523 - DNA, 15 bp, Homo sapiens
gagaattgcttgaat

SEQ ID NO: 160524 - DNA, 15 bp, Homo sapiens
agaattgcttgaatc

SEQ ID NO: 160525 - DNA, 15 bp, Homo sapiens
gaattgcttgaatct

SEQ ID NO: 160526 - DNA, 15 bp, Homo sapiens
aattgcttgaatctg

SEQ ID NO: 160527 - DNA, 15 bp, Homo sapiens
attgcttgaatctgg

SEQ ID NO: 160528 - DNA, 15 bp, Homo sapiens
ttgcttgaatctggg

SEQ ID NO: 160529 - DNA, 15 bp, Homo sapiens
tgcttgaatctggga

SEQ ID NO: 160530 - DNA, 15 bp, Homo sapiens
gcttgaatctgggag

SEQ ID NO: 160531 - DNA, 15 bp, Homo sapiens
cttgaatctgggagg

SEQ ID NO: 160532 - DNA, 15 bp, Homo sapiens
ttgaatctgggaggc

SEQ ID NO: 160533 - DNA, 15 bp, Homo sapiens
tgaatctgggaggcg

SEQ ID NO: 160534 - DNA, 15 bp, Homo sapiens
gaatctgggaggcgg

SEQ ID NO: 160535 - DNA, 15 bp, Homo sapiens
aatctgggaggcgga

SEQ ID NO: 160536 - DNA, 15 bp, Homo sapiens
atctgggaggcggag

SEQ ID NO: 160537 - DNA, 15 bp, Homo sapiens
tctgggaggcggagg

SEQ ID NO: 160538 - DNA, 15 bp, Homo sapiens
tgcagtgagctgagt

SEQ ID NO: 160539 - DNA, 15 bp, Homo sapiens
gcagtgagctgagtt

SEQ ID NO: 160540 - DNA, 15 bp, Homo sapiens
cagtgagctgagttc

SEQ ID NO: 160541 - DNA, 15 bp, Homo sapiens
agtgagctgagttca

SEQ ID NO: 160542 - DNA, 15 bp, Homo sapiens
gtgagctgagttcat

SEQ ID NO: 160543 - DNA, 15 bp, Homo sapiens
tgagctgagttcatg

SEQ ID NO: 160544 - DNA, 15 bp, Homo sapiens
gagctgagttcatgc

SEQ ID NO: 160545 - DNA, 15 bp, Homo sapiens
agctgagttcatgcc

SEQ ID NO: 160546 - DNA, 15 bp, Homo sapiens
gctgagttcatgcca

SEQ ID NO: 160547 - DNA, 15 bp, Homo sapiens
ctgagttcatgccat

SEQ ID NO: 160548 - DNA, 15 bp, Homo sapiens
tgagttcatgccatt

SEQ ID NO: 160549 - DNA, 15 bp, Homo sapiens
gagttcatgccattg

SEQ ID NO: 160550 - DNA, 15 bp, Homo sapiens
agttcatgccattgc

SEQ ID NO: 160551 - DNA, 15 bp, Homo sapiens
gttcatgccattgca

SEQ ID NO: 160552 - DNA, 15 bp, Homo sapiens
ttcatgccattgcat

SEQ ID NO: 160553 - DNA, 15 bp, Homo sapiens
tcatgccattgcatt

SEQ ID NO: 160554 - DNA, 15 bp, Homo sapiens
catgccattgcattc

SEQ ID NO: 160555 - DNA, 15 bp, Homo sapiens
atgccattgcattcc

SEQ ID NO: 160556 - DNA, 15 bp, Homo sapiens
tgccattgcattcca

SEQ ID NO: 160557 - DNA, 15 bp, Homo sapiens
gccattgcattccag

SEQ ID NO: 160558 - DNA, 15 bp, Homo sapiens
ccattgcattccagc

SEQ ID NO: 160559 - DNA, 15 bp, Homo sapiens
cattgcattccagcc

SEQ ID NO: 160560 - DNA, 15 bp, Homo sapiens
attgcattccagcct

SEQ ID NO: 160561 - DNA, 15 bp, Homo sapiens
ttgcattccagcctg

SEQ ID NO: 160562 - DNA, 15 bp, Homo sapiens
tgcattccagcctgg

SEQ ID NO: 160563 - DNA, 15 bp, Homo sapiens
gcattccagcctggg

SEQ ID NO: 160564 - DNA, 15 bp, Homo sapiens
cattccagcctgggc

SEQ ID NO: 160565 - DNA, 15 bp, Homo sapiens
attccagcctgggca

SEQ ID NO: 160566 - DNA, 15 bp, Homo sapiens
ttccagcctgggcaa

SEQ ID NO: 160567 - DNA, 15 bp, Homo sapiens
aacaagagcgaaacc

SEQ ID NO: 160568 - DNA, 15 bp, Homo sapiens
acaagagcgaaacca

SEQ ID NO: 160569 - DNA, 15 bp, Homo sapiens
caagagcgaaaccat

SEQ ID NO: 160570 - DNA, 15 bp, Homo sapiens
aagagcgaaaccatc

SEQ ID NO: 160571 - DNA, 15 bp, Homo sapiens
agagcgaaaccatct

SEQ ID NO: 160572 - DNA, 15 bp, Homo sapiens
gagcgaaaccatctc

SEQ ID NO: 160573 - DNA, 15 bp, Homo sapiens
agcgaaaccatctcc

SEQ ID NO: 160574 - DNA, 15 bp, Homo sapiens
gcgaaaccatctccc

SEQ ID NO: 160575 - DNA, 15 bp, Homo sapiens
cgaaaccatctccca

SEQ ID NO: 160576 - DNA, 15 bp, Homo sapiens
gaaaccatctcccaa

SEQ ID NO: 160577 - DNA, 15 bp, Homo sapiens
aaaccatctcccaaa

SEQ ID NO: 160578 - DNA, 15 bp, Homo sapiens
aaccatctcccaaaa

SEQ ID NO: 160579 - DNA, 15 bp, Homo sapiens
accatctcccaaaag

SEQ ID NO: 160580 - DNA, 15 bp, Homo sapiens
ccatctcccaaaaga

SEQ ID NO: 160581 - DNA, 15 bp, Homo sapiens
catctcccaaaagaa

SEQ ID NO: 160582 - DNA, 15 bp, Homo sapiens
atctcccaaaagaaa

SEQ ID NO: 160583 - DNA, 15 bp, Homo sapiens
tctcccaaaagaaaa

SEQ ID NO: 160584 - DNA, 15 bp, Homo sapiens
ctcccaaaagaaaaa

SEQ ID NO: 160585 - DNA, 15 bp, Homo sapiens
tcccaaaagaaaaaa

SEQ ID NO: 160586 - DNA, 15 bp, Homo sapiens
cccaaaagaaaaaaa

SEQ ID NO: 160587 - DNA, 15 bp, Homo sapiens
ccaaaagaaaaaaaa

SEQ ID NO: 160588 - DNA, 15 bp, Homo sapiens
caaaagaaaaaaaaa

SEQ ID NO: 160589 - DNA, 15 bp, Homo sapiens
aaaagaaaaaaaaaa

SEQ ID NO: 160590 - DNA, 15 bp, Homo sapiens
aaagaaaaaaaaaag

SEQ ID NO: 160591 - DNA, 15 bp, Homo sapiens
aagaaaaaaaaaaga

SEQ ID NO: 160592 - DNA, 15 bp, Homo sapiens
agaaaaaaaaaagaa

SEQ ID NO: 160593 - DNA, 15 bp, Homo sapiens
gaaaaaaaaaagaaa

SEQ ID NO: 160594 - DNA, 15 bp, Homo sapiens
aaaaaaaaaagaaag

SEQ ID NO: 160595 - DNA, 15 bp, Homo sapiens
aaaaaaaaagaaaga

SEQ ID NO: 160596 - DNA, 15 bp, Homo sapiens
aaaaaaaagaaagaa

SEQ ID NO: 160597 - DNA, 15 bp, Homo sapiens
aaaaaaagaaagaaa

SEQ ID NO: 160598 - DNA, 15 bp, Homo sapiens
aaaaagaaagaaaaa

SEQ ID NO: 160599 - DNA, 15 bp, Homo sapiens
aaaagaaagaaaaag

SEQ ID NO: 160600 - DNA, 15 bp, Homo sapiens
aaagaaagaaaaagc

SEQ ID NO: 160601 - DNA, 15 bp, Homo sapiens
aagaaagaaaaagct

SEQ ID NO: 160602 - DNA, 15 bp, Homo sapiens
agaaagaaaaagctt

SEQ ID NO: 160603 - DNA, 15 bp, Homo sapiens
gaaagaaaaagcttc

SEQ ID NO: 160604 - DNA, 15 bp, Homo sapiens
aaagaaaaagcttct

SEQ ID NO: 160605 - DNA, 15 bp, Homo sapiens
aagaaaaagcttcta

SEQ ID NO: 160606 - DNA, 15 bp, Homo sapiens
agaaaaagcttctag

SEQ ID NO: 160607 - DNA, 15 bp, Homo sapiens
gaaaaagcttctagt

SEQ ID NO: 160608 - DNA, 15 bp, Homo sapiens
aaaaagcttctagtt

SEQ ID NO: 160609 - DNA, 15 bp, Homo sapiens
aaaagcttctagttt

SEQ ID NO: 160610 - DNA, 15 bp, Homo sapiens
aaagcttctagtttg

SEQ ID NO: 160611 - DNA, 15 bp, Homo sapiens
aagcttctagtttgg

SEQ ID NO: 160612 - DNA, 15 bp, Homo sapiens
agcttctagtttggt

SEQ ID NO: 160613 - DNA, 15 bp, Homo sapiens
gcttctagtttggtt

SEQ ID NO: 160614 - DNA, 15 bp, Homo sapiens
cttctagtttggtta

SEQ ID NO: 160615 - DNA, 15 bp, Homo sapiens
ttctagtttggttac

SEQ ID NO: 160616 - DNA, 15 bp, Homo sapiens
tctagtttggttaca

SEQ ID NO: 160617 - DNA, 15 bp, Homo sapiens
ctagtttggttacat

SEQ ID NO: 160618 - DNA, 15 bp, Homo sapiens
tagtttggttacatc

SEQ ID NO: 160619 - DNA, 15 bp, Homo sapiens
agtttggttacatct

SEQ ID NO: 160620 - DNA, 15 bp, Homo sapiens
gtttggttacatctt

SEQ ID NO: 160621 - DNA, 15 bp, Homo sapiens
tttggttacatcttg

SEQ ID NO: 160622 - DNA, 15 bp, Homo sapiens
ttggttacatcttgg

SEQ ID NO: 160623 - DNA, 15 bp, Homo sapiens
tggttacatcttggt

SEQ ID NO: 160624 - DNA, 15 bp, Homo sapiens
ggttacatcttggtc

SEQ ID NO: 160625 - DNA, 15 bp, Homo sapiens
gttacatcttggtct

SEQ ID NO: 160626 - DNA, 15 bp, Homo sapiens
ttacatcttggtcta

SEQ ID NO: 160627 - DNA, 15 bp, Homo sapiens
tacatcttggtctat

SEQ ID NO: 160628 - DNA, 15 bp, Homo sapiens
acatcttggtctata

SEQ ID NO: 160629 - DNA, 15 bp, Homo sapiens
catcttggtctataa

SEQ ID NO: 160630 - DNA, 15 bp, Homo sapiens
atcttggtctataag

SEQ ID NO: 160631 - DNA, 15 bp, Homo sapiens
tcttggtctataagg

SEQ ID NO: 160632 - DNA, 15 bp, Homo sapiens
cttggtctataaggt

SEQ ID NO: 160633 - DNA, 15 bp, Homo sapiens
ttggtctataaggtg

SEQ ID NO: 160634 - DNA, 15 bp, Homo sapiens
tggtctataaggtgg

SEQ ID NO: 160635 - DNA, 15 bp, Homo sapiens
ggtctataaggtggt

SEQ ID NO: 160636 - DNA, 15 bp, Homo sapiens
gtctataaggtggtt

SEQ ID NO: 160637 - DNA, 15 bp, Homo sapiens
tctataaggtggttt

SEQ ID NO: 160638 - DNA, 15 bp, Homo sapiens
ctataaggtggtttg

SEQ ID NO: 160639 - DNA, 15 bp, Homo sapiens
tataaggtggtttgt

SEQ ID NO: 160640 - DNA, 15 bp, Homo sapiens
ataaggtggtttgta

SEQ ID NO: 160641 - DNA, 15 bp, Homo sapiens
taaggtggtttgtaa

SEQ ID NO: 160642 - DNA, 15 bp, Homo sapiens
aaggtggtttgtaaa

SEQ ID NO: 160643 - DNA, 15 bp, Homo sapiens
aggtggtttgtaaat

SEQ ID NO: 160644 - DNA, 15 bp, Homo sapiens
ggtggtttgtaaatt

SEQ ID NO: 160645 - DNA, 15 bp, Homo sapiens
gtggtttgtaaattg

SEQ ID NO: 160646 - DNA, 15 bp, Homo sapiens
tggtttgtaaattgg

SEQ ID NO: 160647 - DNA, 15 bp, Homo sapiens
ggtttgtaaattggt

SEQ ID NO: 160648 - DNA, 15 bp, Homo sapiens
gtttgtaaattggtt

SEQ ID NO: 160649 - DNA, 15 bp, Homo sapiens
tttgtaaattggttt

SEQ ID NO: 160650 - DNA, 15 bp, Homo sapiens
ttgtaaattggttta

SEQ ID NO: 160651 - DNA, 15 bp, Homo sapiens
tgtaaattggtttaa

SEQ ID NO: 160652 - DNA, 15 bp, Homo sapiens
gtaaattggtttaac

SEQ ID NO: 160653 - DNA, 15 bp, Homo sapiens
taaattggtttaacc

SEQ ID NO: 160654 - DNA, 15 bp, Homo sapiens
aaattggtttaaccc

SEQ ID NO: 160655 - DNA, 15 bp, Homo sapiens
aattggtttaaccca

SEQ ID NO: 160656 - DNA, 15 bp, Homo sapiens
attggtttaacccaa

SEQ ID NO: 160657 - DNA, 15 bp, Homo sapiens
ttggtttaacccaag

SEQ ID NO: 160658 - DNA, 15 bp, Homo sapiens
tggtttaacccaagg

SEQ ID NO: 160659 - DNA, 15 bp, Homo sapiens
ggtttaacccaaggc

SEQ ID NO: 160660 - DNA, 15 bp, Homo sapiens
gtttaacccaaggcc

SEQ ID NO: 160661 - DNA, 15 bp, Homo sapiens
tttaacccaaggcct

SEQ ID NO: 160662 - DNA, 15 bp, Homo sapiens
ttaacccaaggcctg

SEQ ID NO: 160663 - DNA, 15 bp, Homo sapiens
taacccaaggcctgg

SEQ ID NO: 160664 - DNA, 15 bp, Homo sapiens
aacccaaggcctggt

SEQ ID NO: 160665 - DNA, 15 bp, Homo sapiens
acccaaggcctggtt

SEQ ID NO: 160666 - DNA, 15 bp, Homo sapiens
cccaaggcctggttc

SEQ ID NO: 160667 - DNA, 15 bp, Homo sapiens
ccaaggcctggttct

SEQ ID NO: 160668 - DNA, 15 bp, Homo sapiens
caaggcctggttctc

SEQ ID NO: 160669 - DNA, 15 bp, Homo sapiens
aaggcctggttctca

SEQ ID NO: 160670 - DNA, 15 bp, Homo sapiens
aggcctggttctcat

SEQ ID NO: 160671 - DNA, 15 bp, Homo sapiens
ggcctggttctcata

SEQ ID NO: 160672 - DNA, 15 bp, Homo sapiens
gcctggttctcatat

SEQ ID NO: 160673 - DNA, 15 bp, Homo sapiens
cctggttctcatata

SEQ ID NO: 160674 - DNA, 15 bp, Homo sapiens
ctggttctcatataa

SEQ ID NO: 160675 - DNA, 15 bp, Homo sapiens
tggttctcatataag

SEQ ID NO: 160676 - DNA, 15 bp, Homo sapiens
ggttctcatataagt

SEQ ID NO: 160677 - DNA, 15 bp, Homo sapiens
gttctcatataagta

SEQ ID NO: 160678 - DNA, 15 bp, Homo sapiens
ttctcatataagtaa

SEQ ID NO: 160679 - DNA, 15 bp, Homo sapiens
tctcatataagtaat

SEQ ID NO: 160680 - DNA, 15 bp, Homo sapiens
ctcatataagtaata

SEQ ID NO: 160681 - DNA, 15 bp, Homo sapiens
tcatataagtaatag

SEQ ID NO: 160682 - DNA, 15 bp, Homo sapiens
catataagtaatagg

SEQ ID NO: 160683 - DNA, 15 bp, Homo sapiens
atataagtaataggg

SEQ ID NO: 160684 - DNA, 15 bp, Homo sapiens
tataagtaatagggt

SEQ ID NO: 160685 - DNA, 15 bp, Homo sapiens
ataagtaatagggta

SEQ ID NO: 160686 - DNA, 15 bp, Homo sapiens
taagtaatagggtat

SEQ ID NO: 160687 - DNA, 15 bp, Homo sapiens
aagtaatagggtatt

SEQ ID NO: 160688 - DNA, 15 bp, Homo sapiens
agtaatagggtattt

SEQ ID NO: 160689 - DNA, 15 bp, Homo sapiens
gtaatagggtattta

SEQ ID NO: 160690 - DNA, 15 bp, Homo sapiens
taatagggtatttat

SEQ ID NO: 160691 - DNA, 15 bp, Homo sapiens
aatagggtatttatg

SEQ ID NO: 160692 - DNA, 15 bp, Homo sapiens
atagggtatttatga

SEQ ID NO: 160693 - DNA, 15 bp, Homo sapiens
tagggtatttatgat

SEQ ID NO: 160694 - DNA, 15 bp, Homo sapiens
agggtatttatgatg

SEQ ID NO: 160695 - DNA, 15 bp, Homo sapiens
gggtatttatgatgg

SEQ ID NO: 160696 - DNA, 15 bp, Homo sapiens
ggtatttatgatgga

SEQ ID NO: 160697 - DNA, 15 bp, Homo sapiens
gtatttatgatggag

SEQ ID NO: 160698 - DNA, 15 bp, Homo sapiens
tatttatgatggaga

SEQ ID NO: 160699 - DNA, 15 bp, Homo sapiens
atttatgatggagag

SEQ ID NO: 160700 - DNA, 15 bp, Homo sapiens
tttatgatggagaga

SEQ ID NO: 160701 - DNA, 15 bp, Homo sapiens
ttatgatggagagaa

SEQ ID NO: 160702 - DNA, 15 bp, Homo sapiens
tatgatggagagaag

SEQ ID NO: 160703 - DNA, 15 bp, Homo sapiens
atgatggagagaagg

SEQ ID NO: 160704 - DNA, 15 bp, Homo sapiens
tgatggagagaaggc

SEQ ID NO: 160705 - DNA, 15 bp, Homo sapiens
gatggagagaaggct

SEQ ID NO: 160706 - DNA, 15 bp, Homo sapiens
atggagagaaggctg

SEQ ID NO: 160707 - DNA, 15 bp, Homo sapiens
tggagagaaggctgg

SEQ ID NO: 160708 - DNA, 15 bp, Homo sapiens
ggagagaaggctgga

SEQ ID NO: 160709 - DNA, 15 bp, Homo sapiens
gagagaaggctggaa

SEQ ID NO: 160710 - DNA, 15 bp, Homo sapiens
agagaaggctggaag

SEQ ID NO: 160711 - DNA, 15 bp, Homo sapiens
gagaaggctggaaga

SEQ ID NO: 160712 - DNA, 15 bp, Homo sapiens
agaaggctggaagag

SEQ ID NO: 160713 - DNA, 15 bp, Homo sapiens
gaaggctggaagagg

SEQ ID NO: 160714 - DNA, 15 bp, Homo sapiens
aaggctggaagaggc

SEQ ID NO: 160715 - DNA, 15 bp, Homo sapiens
aggctggaagaggcc

SEQ ID NO: 160716 - DNA, 15 bp, Homo sapiens
ggctggaagaggcct

SEQ ID NO: 160717 - DNA, 15 bp, Homo sapiens
gctggaagaggcctg

SEQ ID NO: 160718 - DNA, 15 bp, Homo sapiens
ctggaagaggcctga

SEQ ID NO: 160719 - DNA, 15 bp, Homo sapiens
tggaagaggcctgaa

SEQ ID NO: 160720 - DNA, 15 bp, Homo sapiens
ggaagaggcctgaac

SEQ ID NO: 160721 - DNA, 15 bp, Homo sapiens
gaagaggcctgaaca

SEQ ID NO: 160722 - DNA, 15 bp, Homo sapiens
aagaggcctgaacac

SEQ ID NO: 160723 - DNA, 15 bp, Homo sapiens
agaggcctgaacaca

SEQ ID NO: 160724 - DNA, 15 bp, Homo sapiens
gaggcctgaacacag

SEQ ID NO: 160725 - DNA, 15 bp, Homo sapiens
aggcctgaacacagg

SEQ ID NO: 160726 - DNA, 15 bp, Homo sapiens
ggcctgaacacaggc

SEQ ID NO: 160727 - DNA, 15 bp, Homo sapiens
gcctgaacacaggct

SEQ ID NO: 160728 - DNA, 15 bp, Homo sapiens
cctgaacacaggctt

SEQ ID NO: 160729 - DNA, 15 bp, Homo sapiens
ctgaacacaggcttc

SEQ ID NO: 160730 - DNA, 15 bp, Homo sapiens
tgaacacaggcttct

SEQ ID NO: 160731 - DNA, 15 bp, Homo sapiens
gaacacaggcttctt

SEQ ID NO: 160732 - DNA, 15 bp, Homo sapiens
aacacaggcttcttt

SEQ ID NO: 160733 - DNA, 15 bp, Homo sapiens
acacaggcttctttt

SEQ ID NO: 160734 - DNA, 15 bp, Homo sapiens
cacaggcttcttttc

SEQ ID NO: 160735 - DNA, 15 bp, Homo sapiens
acaggcttcttttct

SEQ ID NO: 160736 - DNA, 15 bp, Homo sapiens
caggcttcttttctc

SEQ ID NO: 160737 - DNA, 15 bp, Homo sapiens
aggcttcttttctct

SEQ ID NO: 160738 - DNA, 15 bp, Homo sapiens
ggcttcttttctcta

SEQ ID NO: 160739 - DNA, 15 bp, Homo sapiens
gcttcttttctctag

SEQ ID NO: 160740 - DNA, 15 bp, Homo sapiens
cttcttttctctagc

SEQ ID NO: 160741 - DNA, 15 bp, Homo sapiens
ttcttttctctagca

SEQ ID NO: 160742 - DNA, 15 bp, Homo sapiens
tcttttctctagcac

SEQ ID NO: 160743 - DNA, 15 bp, Homo sapiens
cttttctctagcaca

SEQ ID NO: 160744 - DNA, 15 bp, Homo sapiens
ttttctctagcacaa

SEQ ID NO: 160745 - DNA, 15 bp, Homo sapiens
tttctctagcacaac

SEQ ID NO: 160746 - DNA, 15 bp, Homo sapiens
ttctctagcacaacc

SEQ ID NO: 160747 - DNA, 15 bp, Homo sapiens
tctctagcacaaccc

SEQ ID NO: 160748 - DNA, 15 bp, Homo sapiens
ctctagcacaaccct

SEQ ID NO: 160749 - DNA, 15 bp, Homo sapiens
tctagcacaacccta

SEQ ID NO: 160750 - DNA, 15 bp, Homo sapiens
ctagcacaaccctac

SEQ ID NO: 160751 - DNA, 15 bp, Homo sapiens
tagcacaaccctaca

SEQ ID NO: 160752 - DNA, 15 bp, Homo sapiens
agcacaaccctacaa

SEQ ID NO: 160753 - DNA, 15 bp, Homo sapiens
gcacaaccctacaag

SEQ ID NO: 160754 - DNA, 15 bp, Homo sapiens
cacaaccctacaagg

SEQ ID NO: 160755 - DNA, 15 bp, Homo sapiens
acaaccctacaaggc

SEQ ID NO: 160756 - DNA, 15 bp, Homo sapiens
caaccctacaaggcc

SEQ ID NO: 160757 - DNA, 15 bp, Homo sapiens
aaccctacaaggcca

SEQ ID NO: 160758 - DNA, 15 bp, Homo sapiens
accctacaaggccag

SEQ ID NO: 160759 - DNA, 15 bp, Homo sapiens
ccctacaaggccagc

SEQ ID NO: 160760 - DNA, 15 bp, Homo sapiens
cctacaaggccagct

SEQ ID NO: 160761 - DNA, 15 bp, Homo sapiens
ctacaaggccagctg

SEQ ID NO: 160762 - DNA, 15 bp, Homo sapiens
tacaaggccagctga

SEQ ID NO: 160763 - DNA, 15 bp, Homo sapiens
acaaggccagctgat

SEQ ID NO: 160764 - DNA, 15 bp, Homo sapiens
caaggccagctgatt

SEQ ID NO: 160765 - DNA, 15 bp, Homo sapiens
aaggccagctgattc

SEQ ID NO: 160766 - DNA, 15 bp, Homo sapiens
aggccagctgattct

SEQ ID NO: 160767 - DNA, 15 bp, Homo sapiens
ggccagctgattcta

SEQ ID NO: 160768 - DNA, 15 bp, Homo sapiens
gccagctgattctag

SEQ ID NO: 160769 - DNA, 15 bp, Homo sapiens
ccagctgattctagg

SEQ ID NO: 160770 - DNA, 15 bp, Homo sapiens
cagctgattctaggg

SEQ ID NO: 160771 - DNA, 15 bp, Homo sapiens
agctgattctagggt

SEQ ID NO: 160772 - DNA, 15 bp, Homo sapiens
gctgattctagggtt

SEQ ID NO: 160773 - DNA, 15 bp, Homo sapiens
ctgattctagggtta

SEQ ID NO: 160774 - DNA, 15 bp, Homo sapiens
tgattctagggttat

SEQ ID NO: 160775 - DNA, 15 bp, Homo sapiens
gattctagggttatt

SEQ ID NO: 160776 - DNA, 15 bp, Homo sapiens
attctagggttattt

SEQ ID NO: 160777 - DNA, 15 bp, Homo sapiens
ttctagggttatttc

SEQ ID NO: 160778 - DNA, 15 bp, Homo sapiens
tctagggttatttct

SEQ ID NO: 160779 - DNA, 15 bp, Homo sapiens
ctagggttatttctg

SEQ ID NO: 160780 - DNA, 15 bp, Homo sapiens
tagggttatttctgt

SEQ ID NO: 160781 - DNA, 15 bp, Homo sapiens
agggttatttctgtc

SEQ ID NO: 160782 - DNA, 15 bp, Homo sapiens
gggttatttctgtcc

SEQ ID NO: 160783 - DNA, 15 bp, Homo sapiens
ggttatttctgtccg

SEQ ID NO: 160784 - DNA, 15 bp, Homo sapiens
gttatttctgtccgt

SEQ ID NO: 160785 - DNA, 15 bp, Homo sapiens
ttatttctgtccgtt

SEQ ID NO: 160786 - DNA, 15 bp, Homo sapiens
tatttctgtccgttc

SEQ ID NO: 160787 - DNA, 15 bp, Homo sapiens
atttctgtccgttcc

SEQ ID NO: 160788 - DNA, 15 bp, Homo sapiens
tttctgtccgttcct

SEQ ID NO: 160789 - DNA, 15 bp, Homo sapiens
ttctgtccgttcctt

SEQ ID NO: 160790 - DNA, 15 bp, Homo sapiens
tctgtccgttcctta

SEQ ID NO: 160791 - DNA, 15 bp, Homo sapiens
ctgtccgttccttat

SEQ ID NO: 160792 - DNA, 15 bp, Homo sapiens
tgtccgttccttata

SEQ ID NO: 160793 - DNA, 15 bp, Homo sapiens
gtccgttccttatat

SEQ ID NO: 160794 - DNA, 15 bp, Homo sapiens
tccgttccttatatc

SEQ ID NO: 160795 - DNA, 15 bp, Homo sapiens
ccgttccttatatcc

SEQ ID NO: 160796 - DNA, 15 bp, Homo sapiens
cgttccttatatcct

SEQ ID NO: 160797 - DNA, 15 bp, Homo sapiens
gttccttatatcctc

SEQ ID NO: 160798 - DNA, 15 bp, Homo sapiens
ttccttatatcctca

SEQ ID NO: 160799 - DNA, 15 bp, Homo sapiens
tccttatatcctcag

SEQ ID NO: 160800 - DNA, 15 bp, Homo sapiens
ccttatatcctcagg

SEQ ID NO: 160801 - DNA, 15 bp, Homo sapiens
cttatatcctcaggt

SEQ ID NO: 160802 - DNA, 15 bp, Homo sapiens
ttatatcctcaggtg

SEQ ID NO: 160803 - DNA, 15 bp, Homo sapiens
tatatcctcaggtgg

SEQ ID NO: 160804 - DNA, 15 bp, Homo sapiens
atatcctcaggtgga

SEQ ID NO: 160805 - DNA, 15 bp, Homo sapiens
tatcctcaggtggat

SEQ ID NO: 160806 - DNA, 15 bp, Homo sapiens
atcctcaggtggata

SEQ ID NO: 160807 - DNA, 15 bp, Homo sapiens
tcctcaggtggatat

SEQ ID NO: 160808 - DNA, 15 bp, Homo sapiens
cctcaggtggatatt

SEQ ID NO: 160809 - DNA, 15 bp, Homo sapiens
ctcaggtggatattt

SEQ ID NO: 160810 - DNA, 15 bp, Homo sapiens
tcaggtggatattta

SEQ ID NO: 160811 - DNA, 15 bp, Homo sapiens
caggtggatatttac

SEQ ID NO: 160812 - DNA, 15 bp, Homo sapiens
aggtggatatttact

SEQ ID NO: 160813 - DNA, 15 bp, Homo sapiens
ggtggatatttactc

SEQ ID NO: 160814 - DNA, 15 bp, Homo sapiens
gtggatatttactcc

SEQ ID NO: 160815 - DNA, 15 bp, Homo sapiens
tggatatttactcct

SEQ ID NO: 160816 - DNA, 15 bp, Homo sapiens
ggatatttactcctt

SEQ ID NO: 160817 - DNA, 15 bp, Homo sapiens
gatatttactccttt

SEQ ID NO: 160818 - DNA, 15 bp, Homo sapiens
atatttactcctttt

SEQ ID NO: 160819 - DNA, 15 bp, Homo sapiens
tatttactccttttg

SEQ ID NO: 160820 - DNA, 15 bp, Homo sapiens
atttactccttttgc

SEQ ID NO: 160821 - DNA, 15 bp, Homo sapiens
tttactccttttgca

SEQ ID NO: 160822 - DNA, 15 bp, Homo sapiens
ttactccttttgcat

SEQ ID NO: 160823 - DNA, 15 bp, Homo sapiens
tactccttttgcatc

SEQ ID NO: 160824 - DNA, 15 bp, Homo sapiens
actccttttgcatca

SEQ ID NO: 160825 - DNA, 15 bp, Homo sapiens
ctccttttgcatcat

SEQ ID NO: 160826 - DNA, 15 bp, Homo sapiens
tccttttgcatcatt

SEQ ID NO: 160827 - DNA, 15 bp, Homo sapiens
ccttttgcatcatta

SEQ ID NO: 160828 - DNA, 15 bp, Homo sapiens
cttttgcatcattag

SEQ ID NO: 160829 - DNA, 15 bp, Homo sapiens
ttttgcatcattagg

SEQ ID NO: 160830 - DNA, 15 bp, Homo sapiens
tttgcatcattagga

SEQ ID NO: 160831 - DNA, 15 bp, Homo sapiens
ttgcatcattaggaa

SEQ ID NO: 160832 - DNA, 15 bp, Homo sapiens
tgcatcattaggaat

SEQ ID NO: 160833 - DNA, 15 bp, Homo sapiens
gcatcattaggaata

SEQ ID NO: 160834 - DNA, 15 bp, Homo sapiens
catcattaggaatag

SEQ ID NO: 160835 - DNA, 15 bp, Homo sapiens
atcattaggaatagg

SEQ ID NO: 160836 - DNA, 15 bp, Homo sapiens
tcattaggaataggc

SEQ ID NO: 160837 - DNA, 15 bp, Homo sapiens
cattaggaataggct

SEQ ID NO: 160838 - DNA, 15 bp, Homo sapiens
attaggaataggctc

SEQ ID NO: 160839 - DNA, 15 bp, Homo sapiens
ttaggaataggctca

SEQ ID NO: 160840 - DNA, 15 bp, Homo sapiens
taggaataggctcag

SEQ ID NO: 160841 - DNA, 15 bp, Homo sapiens
aggaataggctcagt

SEQ ID NO: 160842 - DNA, 15 bp, Homo sapiens
ggaataggctcagtg

SEQ ID NO: 160843 - DNA, 15 bp, Homo sapiens
gaataggctcagtgc

SEQ ID NO: 160844 - DNA, 15 bp, Homo sapiens
aataggctcagtgct

SEQ ID NO: 160845 - DNA, 15 bp, Homo sapiens
ataggctcagtgctt

SEQ ID NO: 160846 - DNA, 15 bp, Homo sapiens
taggctcagtgcttt

SEQ ID NO: 160847 - DNA, 15 bp, Homo sapiens
aggctcagtgctttc

SEQ ID NO: 160848 - DNA, 15 bp, Homo sapiens
ggctcagtgctttct

SEQ ID NO: 160849 - DNA, 15 bp, Homo sapiens
gctcagtgctttctt

SEQ ID NO: 160850 - DNA, 15 bp, Homo sapiens
ctcagtgctttcttt

SEQ ID NO: 160851 - DNA, 15 bp, Homo sapiens
tcagtgctttctttg

SEQ ID NO: 160852 - DNA, 15 bp, Homo sapiens
cagtgctttctttga

SEQ ID NO: 160853 - DNA, 15 bp, Homo sapiens
agtgctttctttgaa

SEQ ID NO: 160854 - DNA, 15 bp, Homo sapiens
gtgctttctttgaac

SEQ ID NO: 160855 - DNA, 15 bp, Homo sapiens
tgctttctttgaact

SEQ ID NO: 160856 - DNA, 15 bp, Homo sapiens
gctttctttgaactg

SEQ ID NO: 160857 - DNA, 15 bp, Homo sapiens
ctttctttgaactga

SEQ ID NO: 160858 - DNA, 15 bp, Homo sapiens
tttctttgaactgat

SEQ ID NO: 160859 - DNA, 15 bp, Homo sapiens
ttctttgaactgatt

SEQ ID NO: 160860 - DNA, 15 bp, Homo sapiens
tctttgaactgattt

SEQ ID NO: 160861 - DNA, 15 bp, Homo sapiens
ctttgaactgatttt

SEQ ID NO: 160862 - DNA, 15 bp, Homo sapiens
tttgaactgattttt

SEQ ID NO: 160863 - DNA, 15 bp, Homo sapiens
ttgaactgatttttt

SEQ ID NO: 160864 - DNA, 15 bp, Homo sapiens
tgaactgattttttg

SEQ ID NO: 160865 - DNA, 15 bp, Homo sapiens
gaactgattttttgt

SEQ ID NO: 160866 - DNA, 15 bp, Homo sapiens
aactgattttttgtt

SEQ ID NO: 160867 - DNA, 15 bp, Homo sapiens
actgattttttgttt

SEQ ID NO: 160868 - DNA, 15 bp, Homo sapiens
ctgattttttgtttc

SEQ ID NO: 160869 - DNA, 15 bp, Homo sapiens
tgattttttgtttct

SEQ ID NO: 160870 - DNA, 15 bp, Homo sapiens
gattttttgtttctt

SEQ ID NO: 160871 - DNA, 15 bp, Homo sapiens
attttttgtttcttt

SEQ ID NO: 160872 - DNA, 15 bp, Homo sapiens
ttttttgtttctttg

SEQ ID NO: 160873 - DNA, 15 bp, Homo sapiens
tttttgtttctttgt

SEQ ID NO: 160874 - DNA, 15 bp, Homo sapiens
ttttgtttctttgtc

SEQ ID NO: 160875 - DNA, 15 bp, Homo sapiens
tttgtttctttgtct

SEQ ID NO: 160876 - DNA, 15 bp, Homo sapiens
ttgtttctttgtctc

SEQ ID NO: 160877 - DNA, 15 bp, Homo sapiens
tgtttctttgtctct

SEQ ID NO: 160878 - DNA, 15 bp, Homo sapiens
gtttctttgtctctg

SEQ ID NO: 160879 - DNA, 15 bp, Homo sapiens
tttctttgtctctgc

SEQ ID NO: 160880 - DNA, 15 bp, Homo sapiens
ttctttgtctctgca

SEQ ID NO: 160881 - DNA, 15 bp, Homo sapiens
tctttgtctctgcag

SEQ ID NO: 160882 - DNA, 15 bp, Homo sapiens
ctttgtctctgcagc

SEQ ID NO: 160883 - DNA, 15 bp, Homo sapiens
tttgtctctgcagct

SEQ ID NO: 160884 - DNA, 15 bp, Homo sapiens
ttgtctctgcagctt

SEQ ID NO: 160885 - DNA, 15 bp, Homo sapiens
tgtctctgcagctta

SEQ ID NO: 160886 - DNA, 15 bp, Homo sapiens
gtctctgcagcttaa

SEQ ID NO: 160887 - DNA, 15 bp, Homo sapiens
tctctgcagcttaaa

SEQ ID NO: 160888 - DNA, 15 bp, Homo sapiens
ctctgcagcttaaag

SEQ ID NO: 160889 - DNA, 15 bp, Homo sapiens
tctgcagcttaaaga

SEQ ID NO: 160890 - DNA, 15 bp, Homo sapiens
ctgcagcttaaagaa

SEQ ID NO: 160891 - DNA, 15 bp, Homo sapiens
tgcagcttaaagaac

SEQ ID NO: 160892 - DNA, 15 bp, Homo sapiens
gcagcttaaagaaca

SEQ ID NO: 160893 - DNA, 15 bp, Homo sapiens
cagcttaaagaacaa

SEQ ID NO: 160894 - DNA, 15 bp, Homo sapiens
agcttaaagaacaag

SEQ ID NO: 160895 - DNA, 15 bp, Homo sapiens
gcttaaagaacaaga

SEQ ID NO: 160896 - DNA, 15 bp, Homo sapiens
cttaaagaacaagat

SEQ ID NO: 160897 - DNA, 15 bp, Homo sapiens
ttaaagaacaagatc

SEQ ID NO: 160898 - DNA, 15 bp, Homo sapiens
taaagaacaagatct

SEQ ID NO: 160899 - DNA, 15 bp, Homo sapiens
aaagaacaagatctg

SEQ ID NO: 160900 - DNA, 15 bp, Homo sapiens
aagaacaagatctgg

SEQ ID NO: 160901 - DNA, 15 bp, Homo sapiens
agaacaagatctggg

SEQ ID NO: 160902 - DNA, 15 bp, Homo sapiens
gaacaagatctgggt

SEQ ID NO: 160903 - DNA, 15 bp, Homo sapiens
aacaagatctgggtg

SEQ ID NO: 160904 - DNA, 15 bp, Homo sapiens
acaagatctgggtga

SEQ ID NO: 160905 - DNA, 15 bp, Homo sapiens
caagatctgggtgaa

SEQ ID NO: 160906 - DNA, 15 bp, Homo sapiens
aagatctgggtgaat

SEQ ID NO: 160907 - DNA, 15 bp, Homo sapiens
agatctgggtgaatg

SEQ ID NO: 160908 - DNA, 15 bp, Homo sapiens
gatctgggtgaatga

SEQ ID NO: 160909 - DNA, 15 bp, Homo sapiens
atctgggtgaatgag

SEQ ID NO: 160910 - DNA, 15 bp, Homo sapiens
tctgggtgaatgagt

SEQ ID NO: 160911 - DNA, 15 bp, Homo sapiens
ctgggtgaatgagtt

SEQ ID NO: 160912 - DNA, 15 bp, Homo sapiens
tgggtgaatgagttt

SEQ ID NO: 160913 - DNA, 15 bp, Homo sapiens
gggtgaatgagttta

SEQ ID NO: 160914 - DNA, 15 bp, Homo sapiens
ggtgaatgagtttag

SEQ ID NO: 160915 - DNA, 15 bp, Homo sapiens
gtgaatgagtttagg

SEQ ID NO: 160916 - DNA, 15 bp, Homo sapiens
tgaatgagtttaggt

SEQ ID NO: 160917 - DNA, 15 bp, Homo sapiens
gaatgagtttaggta

SEQ ID NO: 160918 - DNA, 15 bp, Homo sapiens
aatgagtttaggtaa

SEQ ID NO: 160919 - DNA, 15 bp, Homo sapiens
atgagtttaggtaag

SEQ ID NO: 160920 - DNA, 15 bp, Homo sapiens
tgagtttaggtaagt

SEQ ID NO: 160921 - DNA, 15 bp, Homo sapiens
gagtttaggtaagtt

SEQ ID NO: 160922 - DNA, 15 bp, Homo sapiens
agtttaggtaagttg

SEQ ID NO: 160923 - DNA, 15 bp, Homo sapiens
gtttaggtaagttgc

SEQ ID NO: 160924 - DNA, 15 bp, Homo sapiens
tttaggtaagttgct

SEQ ID NO: 160925 - DNA, 15 bp, Homo sapiens
ttaggtaagttgctg

SEQ ID NO: 160926 - DNA, 15 bp, Homo sapiens
taggtaagttgctgt

SEQ ID NO: 160927 - DNA, 15 bp, Homo sapiens
aggtaagttgctgtc

SEQ ID NO: 160928 - DNA, 15 bp, Homo sapiens
ggtaagttgctgtct

SEQ ID NO: 160929 - DNA, 15 bp, Homo sapiens
gtaagttgctgtctt

SEQ ID NO: 160930 - DNA, 15 bp, Homo sapiens
taagttgctgtcttt

SEQ ID NO: 160931 - DNA, 15 bp, Homo sapiens
aagttgctgtctttc

SEQ ID NO: 160932 - DNA, 15 bp, Homo sapiens
agttgctgtctttct

SEQ ID NO: 160933 - DNA, 15 bp, Homo sapiens
gttgctgtctttctg

SEQ ID NO: 160934 - DNA, 15 bp, Homo sapiens
ttgctgtctttctgg

SEQ ID NO: 160935 - DNA, 15 bp, Homo sapiens
tgctgtctttctggc

SEQ ID NO: 160936 - DNA, 15 bp, Homo sapiens
gctgtctttctggca

SEQ ID NO: 160937 - DNA, 15 bp, Homo sapiens
ctgtctttctggcac

SEQ ID NO: 160938 - DNA, 15 bp, Homo sapiens
tgtctttctggcacg

SEQ ID NO: 160939 - DNA, 15 bp, Homo sapiens
gtctttctggcacgt

SEQ ID NO: 160940 - DNA, 15 bp, Homo sapiens
tctttctggcacgtt

SEQ ID NO: 160941 - DNA, 15 bp, Homo sapiens
ctttctggcacgttt

SEQ ID NO: 160942 - DNA, 15 bp, Homo sapiens
tttctggcacgttta

SEQ ID NO: 160943 - DNA, 15 bp, Homo sapiens
ttctggcacgtttag

SEQ ID NO: 160944 - DNA, 15 bp, Homo sapiens
tctggcacgtttagc

SEQ ID NO: 160945 - DNA, 15 bp, Homo sapiens
ctggcacgtttagct

SEQ ID NO: 160946 - DNA, 15 bp, Homo sapiens
tggcacgtttagctc

SEQ ID NO: 160947 - DNA, 15 bp, Homo sapiens
ggcacgtttagctca

SEQ ID NO: 160948 - DNA, 15 bp, Homo sapiens
gcacgtttagctcag

SEQ ID NO: 160949 - DNA, 15 bp, Homo sapiens
cacgtttagctcagg

SEQ ID NO: 160950 - DNA, 15 bp, Homo sapiens
acgtttagctcaggg

SEQ ID NO: 160951 - DNA, 15 bp, Homo sapiens
cgtttagctcagggg

SEQ ID NO: 160952 - DNA, 15 bp, Homo sapiens
gtttagctcaggggg

SEQ ID NO: 160953 - DNA, 15 bp, Homo sapiens
tttagctcaggggga

SEQ ID NO: 160954 - DNA, 15 bp, Homo sapiens
ttagctcagggggag

SEQ ID NO: 160955 - DNA, 15 bp, Homo sapiens
tagctcagggggagg

SEQ ID NO: 160956 - DNA, 15 bp, Homo sapiens
agctcagggggagga

SEQ ID NO: 160957 - DNA, 15 bp, Homo sapiens
gctcagggggaggat

SEQ ID NO: 160958 - DNA, 15 bp, Homo sapiens
ctcagggggaggatg

SEQ ID NO: 160959 - DNA, 15 bp, Homo sapiens
tcagggggaggatgg

SEQ ID NO: 160960 - DNA, 15 bp, Homo sapiens
cagggggaggatggt

SEQ ID NO: 160961 - DNA, 15 bp, Homo sapiens
agggggaggatggtg

SEQ ID NO: 160962 - DNA, 15 bp, Homo sapiens
gggggaggatggtgt

SEQ ID NO: 160963 - DNA, 15 bp, Homo sapiens
ggggaggatggtgtt

SEQ ID NO: 160964 - DNA, 15 bp, Homo sapiens
gggaggatggtgttg

SEQ ID NO: 160965 - DNA, 15 bp, Homo sapiens
ggaggatggtgttgt

SEQ ID NO: 160966 - DNA, 15 bp, Homo sapiens
gaggatggtgttgta

SEQ ID NO: 160967 - DNA, 15 bp, Homo sapiens
aggatggtgttgtag

SEQ ID NO: 160968 - DNA, 15 bp, Homo sapiens
ggatggtgttgtagg

SEQ ID NO: 160969 - DNA, 15 bp, Homo sapiens
gatggtgttgtaggt

SEQ ID NO: 160970 - DNA, 15 bp, Homo sapiens
atggtgttgtaggtg

SEQ ID NO: 160971 - DNA, 15 bp, Homo sapiens
tggtgttgtaggtgt

SEQ ID NO: 160972 - DNA, 15 bp, Homo sapiens
ggtgttgtaggtgtc

SEQ ID NO: 160973 - DNA, 15 bp, Homo sapiens
gtgttgtaggtgtct

SEQ ID NO: 160974 - DNA, 15 bp, Homo sapiens
tgttgtaggtgtctt

SEQ ID NO: 160975 - DNA, 15 bp, Homo sapiens
gttgtaggtgtcttg

SEQ ID NO: 160976 - DNA, 15 bp, Homo sapiens
ttgtaggtgtcttgg

SEQ ID NO: 160977 - DNA, 15 bp, Homo sapiens
tgtaggtgtcttgga

SEQ ID NO: 160978 - DNA, 15 bp, Homo sapiens
gtaggtgtcttggat

SEQ ID NO: 160979 - DNA, 15 bp, Homo sapiens
taggtgtcttggatt

SEQ ID NO: 160980 - DNA, 15 bp, Homo sapiens
aggtgtcttggattg

SEQ ID NO: 160981 - DNA, 15 bp, Homo sapiens
ggtgtcttggattga

SEQ ID NO: 160982 - DNA, 15 bp, Homo sapiens
gtgtcttggattgaa

SEQ ID NO: 160983 - DNA, 15 bp, Homo sapiens
tgtcttggattgaag

SEQ ID NO: 160984 - DNA, 15 bp, Homo sapiens
gtcttggattgaaga

SEQ ID NO: 160985 - DNA, 15 bp, Homo sapiens
tcttggattgaagaa

SEQ ID NO: 160986 - DNA, 15 bp, Homo sapiens
cttggattgaagaaa

SEQ ID NO: 160987 - DNA, 15 bp, Homo sapiens
ttggattgaagaaag

SEQ ID NO: 160988 - DNA, 15 bp, Homo sapiens
tggattgaagaaagc

SEQ ID NO: 160989 - DNA, 15 bp, Homo sapiens
ggattgaagaaagcc

SEQ ID NO: 160990 - DNA, 15 bp, Homo sapiens
gattgaagaaagcct

SEQ ID NO: 160991 - DNA, 15 bp, Homo sapiens
attgaagaaagcctt

SEQ ID NO: 160992 - DNA, 15 bp, Homo sapiens
ttgaagaaagccttg

SEQ ID NO: 160993 - DNA, 15 bp, Homo sapiens
tgaagaaagccttgg

SEQ ID NO: 160994 - DNA, 15 bp, Homo sapiens
gaagaaagccttggg

SEQ ID NO: 160995 - DNA, 15 bp, Homo sapiens
aagaaagccttgggg

SEQ ID NO: 160996 - DNA, 15 bp, Homo sapiens
agaaagccttgggga

SEQ ID NO: 160997 - DNA, 15 bp, Homo sapiens
gaaagccttggggat

SEQ ID NO: 160998 - DNA, 15 bp, Homo sapiens
aaagccttggggatt

SEQ ID NO: 160999 - DNA, 15 bp, Homo sapiens
aagccttggggattg

SEQ ID NO: 161000 - DNA, 15 bp, Homo sapiens
agccttggggattgt

SEQ ID NO: 161001 - DNA, 15 bp, Homo sapiens
gccttggggattgtt

SEQ ID NO: 161002 - DNA, 15 bp, Homo sapiens
ccttggggattgttt

SEQ ID NO: 161003 - DNA, 15 bp, Homo sapiens
cttggggattgtttg

SEQ ID NO: 161004 - DNA, 15 bp, Homo sapiens
ttggggattgtttgt

SEQ ID NO: 161005 - DNA, 15 bp, Homo sapiens
tggggattgtttgtc

SEQ ID NO: 161006 - DNA, 15 bp, Homo sapiens
ggggattgtttgtca

SEQ ID NO: 161007 - DNA, 15 bp, Homo sapiens
gggattgtttgtcac

SEQ ID NO: 161008 - DNA, 15 bp, Homo sapiens
ggattgtttgtcact

SEQ ID NO: 161009 - DNA, 15 bp, Homo sapiens
gattgtttgtcactc

SEQ ID NO: 161010 - DNA, 15 bp, Homo sapiens
attgtttgtcactca

SEQ ID NO: 161011 - DNA, 15 bp, Homo sapiens
ttgtttgtcactcac

SEQ ID NO: 161012 - DNA, 15 bp, Homo sapiens
tgtttgtcactcaca

SEQ ID NO: 161013 - DNA, 15 bp, Homo sapiens
gtttgtcactcacac

SEQ ID NO: 161014 - DNA, 15 bp, Homo sapiens
tttgtcactcacaca

SEQ ID NO: 161015 - DNA, 15 bp, Homo sapiens
ttgtcactcacacac

SEQ ID NO: 161016 - DNA, 15 bp, Homo sapiens
tgtcactcacacact

SEQ ID NO: 161017 - DNA, 15 bp, Homo sapiens
gtcactcacacactt

SEQ ID NO: 161018 - DNA, 15 bp, Homo sapiens
tcactcacacacttg

SEQ ID NO: 161019 - DNA, 15 bp, Homo sapiens
cactcacacacttgt

SEQ ID NO: 161020 - DNA, 15 bp, Homo sapiens
actcacacacttgtg

SEQ ID NO: 161021 - DNA, 15 bp, Homo sapiens
ctcacacacttgtgg

SEQ ID NO: 161022 - DNA, 15 bp, Homo sapiens
tcacacacttgtggg

SEQ ID NO: 161023 - DNA, 15 bp, Homo sapiens
cacacacttgtgggt

SEQ ID NO: 161024 - DNA, 15 bp, Homo sapiens
acacacttgtgggtg

SEQ ID NO: 161025 - DNA, 15 bp, Homo sapiens
cacacttgtgggtgc

SEQ ID NO: 161026 - DNA, 15 bp, Homo sapiens
acacttgtgggtgcc

SEQ ID NO: 161027 - DNA, 15 bp, Homo sapiens
cacttgtgggtgcca

SEQ ID NO: 161028 - DNA, 15 bp, Homo sapiens
acttgtgggtgccat

SEQ ID NO: 161029 - DNA, 15 bp, Homo sapiens
cttgtgggtgccatc

SEQ ID NO: 161030 - DNA, 15 bp, Homo sapiens
ttgtgggtgccatct

SEQ ID NO: 161031 - DNA, 15 bp, Homo sapiens
tgtgggtgccatctc

SEQ ID NO: 161032 - DNA, 15 bp, Homo sapiens
gtgggtgccatctca

SEQ ID NO: 161033 - DNA, 15 bp, Homo sapiens
tgggtgccatctcac

SEQ ID NO: 161034 - DNA, 15 bp, Homo sapiens
gggtgccatctcact

SEQ ID NO: 161035 - DNA, 15 bp, Homo sapiens
ggtgccatctcactg

SEQ ID NO: 161036 - DNA, 15 bp, Homo sapiens
gtgccatctcactgt

SEQ ID NO: 161037 - DNA, 15 bp, Homo sapiens
tgccatctcactgtg

SEQ ID NO: 161038 - DNA, 15 bp, Homo sapiens
gccatctcactgtga

SEQ ID NO: 161039 - DNA, 15 bp, Homo sapiens
ccatctcactgtgag

SEQ ID NO: 161040 - DNA, 15 bp, Homo sapiens
catctcactgtgagg

SEQ ID NO: 161041 - DNA, 15 bp, Homo sapiens
atctcactgtgagga

SEQ ID NO: 161042 - DNA, 15 bp, Homo sapiens
tctcactgtgaggag

SEQ ID NO: 161043 - DNA, 15 bp, Homo sapiens
ctcactgtgaggagg

SEQ ID NO: 161044 - DNA, 15 bp, Homo sapiens
tcactgtgaggagga

SEQ ID NO: 161045 - DNA, 15 bp, Homo sapiens
cactgtgaggaggac

SEQ ID NO: 161046 - DNA, 15 bp, Homo sapiens
actgtgaggaggaca

SEQ ID NO: 161047 - DNA, 15 bp, Homo sapiens
ctgtgaggaggacag

SEQ ID NO: 161048 - DNA, 15 bp, Homo sapiens
tgtgaggaggacaga

SEQ ID NO: 161049 - DNA, 15 bp, Homo sapiens
gtgaggaggacagaa

SEQ ID NO: 161050 - DNA, 15 bp, Homo sapiens
tgaggaggacagaag

SEQ ID NO: 161051 - DNA, 15 bp, Homo sapiens
gaggaggacagaagc

SEQ ID NO: 161052 - DNA, 15 bp, Homo sapiens
aggaggacagaagcc

SEQ ID NO: 161053 - DNA, 15 bp, Homo sapiens
ggaggacagaagccc

SEQ ID NO: 161054 - DNA, 15 bp, Homo sapiens
gaggacagaagccct

SEQ ID NO: 161055 - DNA, 15 bp, Homo sapiens
aggacagaagccctg

SEQ ID NO: 161056 - DNA, 15 bp, Homo sapiens
ggacagaagccctgt

SEQ ID NO: 161057 - DNA, 15 bp, Homo sapiens
gacagaagccctgtg

SEQ ID NO: 161058 - DNA, 15 bp, Homo sapiens
acagaagccctgtga

SEQ ID NO: 161059 - DNA, 15 bp, Homo sapiens
cagaagccctgtgaa

SEQ ID NO: 161060 - DNA, 15 bp, Homo sapiens
agaagccctgtgaac

SEQ ID NO: 161061 - DNA, 15 bp, Homo sapiens
gaagccctgtgaaca

SEQ ID NO: 161062 - DNA, 15 bp, Homo sapiens
aagccctgtgaacat

SEQ ID NO: 161063 - DNA, 15 bp, Homo sapiens
agccctgtgaacatg

SEQ ID NO: 161064 - DNA, 15 bp, Homo sapiens
gccctgtgaacatgt

SEQ ID NO: 161065 - DNA, 15 bp, Homo sapiens
ccctgtgaacatgtg

SEQ ID NO: 161066 - DNA, 15 bp, Homo sapiens
cctgtgaacatgtgg

SEQ ID NO: 161067 - DNA, 15 bp, Homo sapiens
ctgtgaacatgtgga

SEQ ID NO: 161068 - DNA, 15 bp, Homo sapiens
tgtgaacatgtggag

SEQ ID NO: 161069 - DNA, 15 bp, Homo sapiens
gtgaacatgtggagc

SEQ ID NO: 161070 - DNA, 15 bp, Homo sapiens
tgaacatgtggagca

SEQ ID NO: 161071 - DNA, 15 bp, Homo sapiens
gaacatgtggagcac

SEQ ID NO: 161072 - DNA, 15 bp, Homo sapiens
aacatgtggagcaca

SEQ ID NO: 161073 - DNA, 15 bp, Homo sapiens
acatgtggagcacac

SEQ ID NO: 161074 - DNA, 15 bp, Homo sapiens
catgtggagcacaca

SEQ ID NO: 161075 - DNA, 15 bp, Homo sapiens
atgtggagcacacag

SEQ ID NO: 161076 - DNA, 15 bp, Homo sapiens
tgtggagcacacagg

SEQ ID NO: 161077 - DNA, 15 bp, Homo sapiens
gtggagcacacaggg

SEQ ID NO: 161078 - DNA, 15 bp, Homo sapiens
tggagcacacagggg

SEQ ID NO: 161079 - DNA, 15 bp, Homo sapiens
ggagcacacaggggc

SEQ ID NO: 161080 - DNA, 15 bp, Homo sapiens
gagcacacaggggca

SEQ ID NO: 161081 - DNA, 15 bp, Homo sapiens
agcacacaggggcac

SEQ ID NO: 161082 - DNA, 15 bp, Homo sapiens
gcacacaggggcaca

SEQ ID NO: 161083 - DNA, 15 bp, Homo sapiens
cacacaggggcacag

SEQ ID NO: 161084 - DNA, 15 bp, Homo sapiens
acacaggggcacaga

SEQ ID NO: 161085 - DNA, 15 bp, Homo sapiens
cacaggggcacagac

SEQ ID NO: 161086 - DNA, 15 bp, Homo sapiens
acaggggcacagaca

SEQ ID NO: 161087 - DNA, 15 bp, Homo sapiens
caggggcacagacag

SEQ ID NO: 161088 - DNA, 15 bp, Homo sapiens
aggggcacagacaga

SEQ ID NO: 161089 - DNA, 15 bp, Homo sapiens
ggggcacagacagat

SEQ ID NO: 161090 - DNA, 15 bp, Homo sapiens
gggcacagacagatt

SEQ ID NO: 161091 - DNA, 15 bp, Homo sapiens
ggcacagacagattt

SEQ ID NO: 161092 - DNA, 15 bp, Homo sapiens
gcacagacagattta

SEQ ID NO: 161093 - DNA, 15 bp, Homo sapiens
cacagacagatttag

SEQ ID NO: 161094 - DNA, 15 bp, Homo sapiens
acagacagatttaga

SEQ ID NO: 161095 - DNA, 15 bp, Homo sapiens
cagacagatttagat

SEQ ID NO: 161096 - DNA, 15 bp, Homo sapiens
agacagatttagatt

SEQ ID NO: 161097 - DNA, 15 bp, Homo sapiens
gacagatttagatta

SEQ ID NO: 161098 - DNA, 15 bp, Homo sapiens
acagatttagattag

SEQ ID NO: 161099 - DNA, 15 bp, Homo sapiens
cagatttagattagg

SEQ ID NO: 161100 - DNA, 15 bp, Homo sapiens
agatttagattaggc

SEQ ID NO: 161101 - DNA, 15 bp, Homo sapiens
gatttagattaggcc

SEQ ID NO: 161102 - DNA, 15 bp, Homo sapiens
atttagattaggcct

SEQ ID NO: 161103 - DNA, 15 bp, Homo sapiens
tttagattaggcctg

SEQ ID NO: 161104 - DNA, 15 bp, Homo sapiens
ttagattaggcctgc

SEQ ID NO: 161105 - DNA, 15 bp, Homo sapiens
tagattaggcctgct

SEQ ID NO: 161106 - DNA, 15 bp, Homo sapiens
agattaggcctgctt

SEQ ID NO: 161107 - DNA, 15 bp, Homo sapiens
gattaggcctgcttt

SEQ ID NO: 161108 - DNA, 15 bp, Homo sapiens
attaggcctgcttta

SEQ ID NO: 161109 - DNA, 15 bp, Homo sapiens
ttaggcctgctttat

SEQ ID NO: 161110 - DNA, 15 bp, Homo sapiens
taggcctgctttata

SEQ ID NO: 161111 - DNA, 15 bp, Homo sapiens
aggcctgctttatag

SEQ ID NO: 161112 - DNA, 15 bp, Homo sapiens
ggcctgctttataga

SEQ ID NO: 161113 - DNA, 15 bp, Homo sapiens
gcctgctttatagag

SEQ ID NO: 161114 - DNA, 15 bp, Homo sapiens
cctgctttatagagt

SEQ ID NO: 161115 - DNA, 15 bp, Homo sapiens
ctgctttatagagtt

SEQ ID NO: 161116 - DNA, 15 bp, Homo sapiens
tgctttatagagttt

SEQ ID NO: 161117 - DNA, 15 bp, Homo sapiens
gctttatagagtttc

SEQ ID NO: 161118 - DNA, 15 bp, Homo sapiens
ctttatagagtttct

SEQ ID NO: 161119 - DNA, 15 bp, Homo sapiens
tttatagagtttctg

SEQ ID NO: 161120 - DNA, 15 bp, Homo sapiens
ttatagagtttctgc

SEQ ID NO: 161121 - DNA, 15 bp, Homo sapiens
tatagagtttctgcc

SEQ ID NO: 161122 - DNA, 15 bp, Homo sapiens
atagagtttctgcct

SEQ ID NO: 161123 - DNA, 15 bp, Homo sapiens
tagagtttctgccta

SEQ ID NO: 161124 - DNA, 15 bp, Homo sapiens
agagtttctgcctag

SEQ ID NO: 161125 - DNA, 15 bp, Homo sapiens
gagtttctgcctaga

SEQ ID NO: 161126 - DNA, 15 bp, Homo sapiens
agtttctgcctagag

SEQ ID NO: 161127 - DNA, 15 bp, Homo sapiens
gtttctgcctagagc

SEQ ID NO: 161128 - DNA, 15 bp, Homo sapiens
tttctgcctagagca

SEQ ID NO: 161129 - DNA, 15 bp, Homo sapiens
ttctgcctagagcat

SEQ ID NO: 161130 - DNA, 15 bp, Homo sapiens
tctgcctagagcatc

SEQ ID NO: 161131 - DNA, 15 bp, Homo sapiens
ctgcctagagcatca

SEQ ID NO: 161132 - DNA, 15 bp, Homo sapiens
tgcctagagcatcat

SEQ ID NO: 161133 - DNA, 15 bp, Homo sapiens
gcctagagcatcatg

SEQ ID NO: 161134 - DNA, 15 bp, Homo sapiens
cctagagcatcatgg

SEQ ID NO: 161135 - DNA, 15 bp, Homo sapiens
ctagagcatcatggc

SEQ ID NO: 161136 - DNA, 15 bp, Homo sapiens
tagagcatcatggct

SEQ ID NO: 161137 - DNA, 15 bp, Homo sapiens
agagcatcatggctc

SEQ ID NO: 161138 - DNA, 15 bp, Homo sapiens
gagcatcatggctca

SEQ ID NO: 161139 - DNA, 15 bp, Homo sapiens
agcatcatggctcag

SEQ ID NO: 161140 - DNA, 15 bp, Homo sapiens
gcatcatggctcagt

SEQ ID NO: 161141 - DNA, 15 bp, Homo sapiens
catcatggctcagtg

SEQ ID NO: 161142 - DNA, 15 bp, Homo sapiens
atcatggctcagtgc

SEQ ID NO: 161143 - DNA, 15 bp, Homo sapiens
tcatggctcagtgcc

SEQ ID NO: 161144 - DNA, 15 bp, Homo sapiens
catggctcagtgccc

SEQ ID NO: 161145 - DNA, 15 bp, Homo sapiens
atggctcagtgccca

SEQ ID NO: 161146 - DNA, 15 bp, Homo sapiens
tggctcagtgcccag

SEQ ID NO: 161147 - DNA, 15 bp, Homo sapiens
ggctcagtgcccagc

SEQ ID NO: 161148 - DNA, 15 bp, Homo sapiens
gctcagtgcccagca

SEQ ID NO: 161149 - DNA, 15 bp, Homo sapiens
ctcagtgcccagcag

SEQ ID NO: 161150 - DNA, 15 bp, Homo sapiens
tcagtgcccagcagc

SEQ ID NO: 161151 - DNA, 15 bp, Homo sapiens
cagtgcccagcagcc

SEQ ID NO: 161152 - DNA, 15 bp, Homo sapiens
agtgcccagcagccc

SEQ ID NO: 161153 - DNA, 15 bp, Homo sapiens
gtgcccagcagcccc

SEQ ID NO: 161154 - DNA, 15 bp, Homo sapiens
tgcccagcagcccct

SEQ ID NO: 161155 - DNA, 15 bp, Homo sapiens
gcccagcagcccctc

SEQ ID NO: 161156 - DNA, 15 bp, Homo sapiens
cccagcagcccctcc

SEQ ID NO: 161157 - DNA, 15 bp, Homo sapiens
ccagcagcccctcca

SEQ ID NO: 161158 - DNA, 15 bp, Homo sapiens
cagcagcccctccag

SEQ ID NO: 161159 - DNA, 15 bp, Homo sapiens
agcagcccctccaga

SEQ ID NO: 161160 - DNA, 15 bp, Homo sapiens
gcagcccctccagag

SEQ ID NO: 161161 - DNA, 15 bp, Homo sapiens
cagcccctccagagg

SEQ ID NO: 161162 - DNA, 15 bp, Homo sapiens
agcccctccagaggc

SEQ ID NO: 161163 - DNA, 15 bp, Homo sapiens
gcccctccagaggcc

SEQ ID NO: 161164 - DNA, 15 bp, Homo sapiens
cccctccagaggcct

SEQ ID NO: 161165 - DNA, 15 bp, Homo sapiens
ccctccagaggcctc

SEQ ID NO: 161166 - DNA, 15 bp, Homo sapiens
cctccagaggcctct

SEQ ID NO: 161167 - DNA, 15 bp, Homo sapiens
ctccagaggcctctg

SEQ ID NO: 161168 - DNA, 15 bp, Homo sapiens
tccagaggcctctga

SEQ ID NO: 161169 - DNA, 15 bp, Homo sapiens
ccagaggcctctgaa

SEQ ID NO: 161170 - DNA, 15 bp, Homo sapiens
cagaggcctctgaaa

SEQ ID NO: 161171 - DNA, 15 bp, Homo sapiens
agaggcctctgaaat

SEQ ID NO: 161172 - DNA, 15 bp, Homo sapiens
gaggcctctgaaata

SEQ ID NO: 161173 - DNA, 15 bp, Homo sapiens
aggcctctgaaatat

SEQ ID NO: 161174 - DNA, 15 bp, Homo sapiens
ggcctctgaaatatt

SEQ ID NO: 161175 - DNA, 15 bp, Homo sapiens
gcctctgaaatattt

SEQ ID NO: 161176 - DNA, 15 bp, Homo sapiens
cctctgaaatatttg

SEQ ID NO: 161177 - DNA, 15 bp, Homo sapiens
ctctgaaatatttga

SEQ ID NO: 161178 - DNA, 15 bp, Homo sapiens
tctgaaatatttgat

SEQ ID NO: 161179 - DNA, 15 bp, Homo sapiens
ctgaaatatttgata

SEQ ID NO: 161180 - DNA, 15 bp, Homo sapiens
tgaaatatttgatat

SEQ ID NO: 161181 - DNA, 15 bp, Homo sapiens
gaaatatttgatata

SEQ ID NO: 161182 - DNA, 15 bp, Homo sapiens
aaatatttgatatac

SEQ ID NO: 161183 - DNA, 15 bp, Homo sapiens
aatatttgatatact

SEQ ID NO: 161184 - DNA, 15 bp, Homo sapiens
atatttgatatactg

SEQ ID NO: 161185 - DNA, 15 bp, Homo sapiens
tatttgatatactga

SEQ ID NO: 161186 - DNA, 15 bp, Homo sapiens
atttgatatactgat

SEQ ID NO: 161187 - DNA, 15 bp, Homo sapiens
tttgatatactgatt

SEQ ID NO: 161188 - DNA, 15 bp, Homo sapiens
ttgatatactgattt

SEQ ID NO: 161189 - DNA, 15 bp, Homo sapiens
tgatatactgatttc

SEQ ID NO: 161190 - DNA, 15 bp, Homo sapiens
gatatactgatttcc

SEQ ID NO: 161191 - DNA, 15 bp, Homo sapiens
atatactgatttcct

SEQ ID NO: 161192 - DNA, 15 bp, Homo sapiens
tatactgatttcctt

SEQ ID NO: 161193 - DNA, 15 bp, Homo sapiens
atactgatttccttg

SEQ ID NO: 161194 - DNA, 15 bp, Homo sapiens
tactgatttccttga

SEQ ID NO: 161195 - DNA, 15 bp, Homo sapiens
actgatttccttgag

SEQ ID NO: 161196 - DNA, 15 bp, Homo sapiens
ctgatttccttgagg

SEQ ID NO: 161197 - DNA, 15 bp, Homo sapiens
tgatttccttgagga

SEQ ID NO: 161198 - DNA, 15 bp, Homo sapiens
gatttccttgaggag

SEQ ID NO: 161199 - DNA, 15 bp, Homo sapiens
atttccttgaggaga

SEQ ID NO: 161200 - DNA, 15 bp, Homo sapiens
tttccttgaggagaa

SEQ ID NO: 161201 - DNA, 15 bp, Homo sapiens
ttccttgaggagaat

SEQ ID NO: 161202 - DNA, 15 bp, Homo sapiens
tccttgaggagaatc

SEQ ID NO: 161203 - DNA, 15 bp, Homo sapiens
ccttgaggagaatca

SEQ ID NO: 161204 - DNA, 15 bp, Homo sapiens
cttgaggagaatcag

SEQ ID NO: 161205 - DNA, 15 bp, Homo sapiens
ttgaggagaatcaga

SEQ ID NO: 161206 - DNA, 15 bp, Homo sapiens
tgaggagaatcagaa

SEQ ID NO: 161207 - DNA, 15 bp, Homo sapiens
gaggagaatcagaaa

SEQ ID NO: 161208 - DNA, 15 bp, Homo sapiens
aggagaatcagaaat

SEQ ID NO: 161209 - DNA, 15 bp, Homo sapiens
ggagaatcagaaatc

SEQ ID NO: 161210 - DNA, 15 bp, Homo sapiens
gagaatcagaaatct

SEQ ID NO: 161211 - DNA, 15 bp, Homo sapiens
agaatcagaaatctc

SEQ ID NO: 161212 - DNA, 15 bp, Homo sapiens
gaatcagaaatctcc

SEQ ID NO: 161213 - DNA, 15 bp, Homo sapiens
aatcagaaatctcct

SEQ ID NO: 161214 - DNA, 15 bp, Homo sapiens
atcagaaatctcctg

SEQ ID NO: 161215 - DNA, 15 bp, Homo sapiens
tcagaaatctcctgc

SEQ ID NO: 161216 - DNA, 15 bp, Homo sapiens
cagaaatctcctgca

SEQ ID NO: 161217 - DNA, 15 bp, Homo sapiens
agaaatctcctgcag

SEQ ID NO: 161218 - DNA, 15 bp, Homo sapiens
gaaatctcctgcagg

SEQ ID NO: 161219 - DNA, 15 bp, Homo sapiens
aaatctcctgcaggt

SEQ ID NO: 161220 - DNA, 15 bp, Homo sapiens
aatctcctgcaggtg

SEQ ID NO: 161221 - DNA, 15 bp, Homo sapiens
atctcctgcaggtgt

SEQ ID NO: 161222 - DNA, 15 bp, Homo sapiens
tctcctgcaggtgtc

SEQ ID NO: 161223 - DNA, 15 bp, Homo sapiens
ctcctgcaggtgtct

SEQ ID NO: 161224 - DNA, 15 bp, Homo sapiens
tcctgcaggtgtcta

SEQ ID NO: 161225 - DNA, 15 bp, Homo sapiens
cctgcaggtgtctag

SEQ ID NO: 161226 - DNA, 15 bp, Homo sapiens
ctgcaggtgtctagg

SEQ ID NO: 161227 - DNA, 15 bp, Homo sapiens
tgcaggtgtctaggg

SEQ ID NO: 161228 - DNA, 15 bp, Homo sapiens
gcaggtgtctaggga

SEQ ID NO: 161229 - DNA, 15 bp, Homo sapiens
caggtgtctagggat

SEQ ID NO: 161230 - DNA, 15 bp, Homo sapiens
aggtgtctagggatt

SEQ ID NO: 161231 - DNA, 15 bp, Homo sapiens
ggtgtctagggattt

SEQ ID NO: 161232 - DNA, 15 bp, Homo sapiens
gtgtctagggatttc

SEQ ID NO: 161233 - DNA, 15 bp, Homo sapiens
tgtctagggatttca

SEQ ID NO: 161234 - DNA, 15 bp, Homo sapiens
gtctagggatttcaa

SEQ ID NO: 161235 - DNA, 15 bp, Homo sapiens
tctagggatttcaag

SEQ ID NO: 161236 - DNA, 15 bp, Homo sapiens
ctagggatttcaagt

SEQ ID NO: 161237 - DNA, 15 bp, Homo sapiens
tagggatttcaagta

SEQ ID NO: 161238 - DNA, 15 bp, Homo sapiens
agggatttcaagtaa

SEQ ID NO: 161239 - DNA, 15 bp, Homo sapiens
gggatttcaagtaag

SEQ ID NO: 161240 - DNA, 15 bp, Homo sapiens
ggatttcaagtaagt

SEQ ID NO: 161241 - DNA, 15 bp, Homo sapiens
gatttcaagtaagta

SEQ ID NO: 161242 - DNA, 15 bp, Homo sapiens
atttcaagtaagtag

SEQ ID NO: 161243 - DNA, 15 bp, Homo sapiens
tttcaagtaagtagt

SEQ ID NO: 161244 - DNA, 15 bp, Homo sapiens
ttcaagtaagtagtg

SEQ ID NO: 161245 - DNA, 15 bp, Homo sapiens
tcaagtaagtagtgt

SEQ ID NO: 161246 - DNA, 15 bp, Homo sapiens
caagtaagtagtgtt

SEQ ID NO: 161247 - DNA, 15 bp, Homo sapiens
aagtaagtagtgttg

SEQ ID NO: 161248 - DNA, 15 bp, Homo sapiens
agtaagtagtgttgt

SEQ ID NO: 161249 - DNA, 15 bp, Homo sapiens
gtaagtagtgttgtg

SEQ ID NO: 161250 - DNA, 15 bp, Homo sapiens
taagtagtgttgtga

SEQ ID NO: 161251 - DNA, 15 bp, Homo sapiens
aagtagtgttgtgag

SEQ ID NO: 161252 - DNA, 15 bp, Homo sapiens
agtagtgttgtgagg

SEQ ID NO: 161253 - DNA, 15 bp, Homo sapiens
gtagtgttgtgaggg

SEQ ID NO: 161254 - DNA, 15 bp, Homo sapiens
tagtgttgtgagggg

SEQ ID NO: 161255 - DNA, 15 bp, Homo sapiens
agtgttgtgagggga

SEQ ID NO: 161256 - DNA, 15 bp, Homo sapiens
gtgttgtgaggggaa

SEQ ID NO: 161257 - DNA, 15 bp, Homo sapiens
tgttgtgaggggaat

SEQ ID NO: 161258 - DNA, 15 bp, Homo sapiens
gttgtgaggggaata

SEQ ID NO: 161259 - DNA, 15 bp, Homo sapiens
ttgtgaggggaatac

SEQ ID NO: 161260 - DNA, 15 bp, Homo sapiens
tgtgaggggaatacc

SEQ ID NO: 161261 - DNA, 15 bp, Homo sapiens
gtgaggggaatacct

SEQ ID NO: 161262 - DNA, 15 bp, Homo sapiens
tgaggggaataccta

SEQ ID NO: 161263 - DNA, 15 bp, Homo sapiens
gaggggaatacctac

SEQ ID NO: 161264 - DNA, 15 bp, Homo sapiens
aggggaatacctact

SEQ ID NO: 161265 - DNA, 15 bp, Homo sapiens
ggggaatacctactt

SEQ ID NO: 161266 - DNA, 15 bp, Homo sapiens
gggaatacctacttg

SEQ ID NO: 161267 - DNA, 15 bp, Homo sapiens
ggaatacctacttgt

SEQ ID NO: 161268 - DNA, 15 bp, Homo sapiens
gaatacctacttgta

SEQ ID NO: 161269 - DNA, 15 bp, Homo sapiens
aatacctacttgtac

SEQ ID NO: 161270 - DNA, 15 bp, Homo sapiens
atacctacttgtact

SEQ ID NO: 161271 - DNA, 15 bp, Homo sapiens
tacctacttgtactt

SEQ ID NO: 161272 - DNA, 15 bp, Homo sapiens
acctacttgtacttt

SEQ ID NO: 161273 - DNA, 15 bp, Homo sapiens
cctacttgtactttc

SEQ ID NO: 161274 - DNA, 15 bp, Homo sapiens
ctacttgtactttcc

SEQ ID NO: 161275 - DNA, 15 bp, Homo sapiens
tacttgtactttccc

SEQ ID NO: 161276 - DNA, 15 bp, Homo sapiens
acttgtactttcccc

SEQ ID NO: 161277 - DNA, 15 bp, Homo sapiens
cttgtactttccccc

SEQ ID NO: 161278 - DNA, 15 bp, Homo sapiens
ttgtactttcccccc

SEQ ID NO: 161279 - DNA, 15 bp, Homo sapiens
tgtactttcccccca

SEQ ID NO: 161280 - DNA, 15 bp, Homo sapiens
gtactttccccccaa

SEQ ID NO: 161281 - DNA, 15 bp, Homo sapiens
tactttccccccaaa

SEQ ID NO: 161282 - DNA, 15 bp, Homo sapiens
actttccccccaaac

SEQ ID NO: 161283 - DNA, 15 bp, Homo sapiens
ctttccccccaaacc

SEQ ID NO: 161284 - DNA, 15 bp, Homo sapiens
tttccccccaaacca

SEQ ID NO: 161285 - DNA, 15 bp, Homo sapiens
ttccccccaaaccag

SEQ ID NO: 161286 - DNA, 15 bp, Homo sapiens
tccccccaaaccaga

SEQ ID NO: 161287 - DNA, 15 bp, Homo sapiens
ccccccaaaccagat

SEQ ID NO: 161288 - DNA, 15 bp, Homo sapiens
cccccaaaccagatt

SEQ ID NO: 161289 - DNA, 15 bp, Homo sapiens
ccccaaaccagattc

SEQ ID NO: 161290 - DNA, 15 bp, Homo sapiens
cccaaaccagattcc

SEQ ID NO: 161291 - DNA, 15 bp, Homo sapiens
ccaaaccagattccc

SEQ ID NO: 161292 - DNA, 15 bp, Homo sapiens
caaaccagattcccg

SEQ ID NO: 161293 - DNA, 15 bp, Homo sapiens
aaaccagattcccga

SEQ ID NO: 161294 - DNA, 15 bp, Homo sapiens
aaccagattcccgag

SEQ ID NO: 161295 - DNA, 15 bp, Homo sapiens
accagattcccgagg

SEQ ID NO: 161296 - DNA, 15 bp, Homo sapiens
ccagattcccgaggc

SEQ ID NO: 161297 - DNA, 15 bp, Homo sapiens
cagattcccgaggct

SEQ ID NO: 161298 - DNA, 15 bp, Homo sapiens
agattcccgaggctt

SEQ ID NO: 161299 - DNA, 15 bp, Homo sapiens
gattcccgaggcttc

SEQ ID NO: 161300 - DNA, 15 bp, Homo sapiens
attcccgaggcttct

SEQ ID NO: 161301 - DNA, 15 bp, Homo sapiens
ttcccgaggcttctt

SEQ ID NO: 161302 - DNA, 15 bp, Homo sapiens
tcccgaggcttctta

SEQ ID NO: 161303 - DNA, 15 bp, Homo sapiens
cccgaggcttcttaa

SEQ ID NO: 161304 - DNA, 15 bp, Homo sapiens
ccgaggcttcttaag

SEQ ID NO: 161305 - DNA, 15 bp, Homo sapiens
cgaggcttcttaagg

SEQ ID NO: 161306 - DNA, 15 bp, Homo sapiens
gaggcttcttaagga

SEQ ID NO: 161307 - DNA, 15 bp, Homo sapiens
aggcttcttaaggac

SEQ ID NO: 161308 - DNA, 15 bp, Homo sapiens
ggcttcttaaggact

SEQ ID NO: 161309 - DNA, 15 bp, Homo sapiens
gcttcttaaggactc

SEQ ID NO: 161310 - DNA, 15 bp, Homo sapiens
cttcttaaggactca

SEQ ID NO: 161311 - DNA, 15 bp, Homo sapiens
ttcttaaggactcaa

SEQ ID NO: 161312 - DNA, 15 bp, Homo sapiens
tcttaaggactcaag

SEQ ID NO: 161313 - DNA, 15 bp, Homo sapiens
cttaaggactcaagg

SEQ ID NO: 161314 - DNA, 15 bp, Homo sapiens
ttaaggactcaagga

SEQ ID NO: 161315 - DNA, 15 bp, Homo sapiens
taaggactcaaggac

SEQ ID NO: 161316 - DNA, 15 bp, Homo sapiens
aaggactcaaggaca

SEQ ID NO: 161317 - DNA, 15 bp, Homo sapiens
aggactcaaggacaa

SEQ ID NO: 161318 - DNA, 15 bp, Homo sapiens
ggactcaaggacaat

SEQ ID NO: 161319 - DNA, 15 bp, Homo sapiens
gactcaaggacaatt

SEQ ID NO: 161320 - DNA, 15 bp, Homo sapiens
actcaaggacaattt

SEQ ID NO: 161321 - DNA, 15 bp, Homo sapiens
ctcaaggacaatttc

SEQ ID NO: 161322 - DNA, 15 bp, Homo sapiens
tcaaggacaatttct

SEQ ID NO: 161323 - DNA, 15 bp, Homo sapiens
caaggacaatttcta

SEQ ID NO: 161324 - DNA, 15 bp, Homo sapiens
aaggacaatttctag

SEQ ID NO: 161325 - DNA, 15 bp, Homo sapiens
aggacaatttctagg

SEQ ID NO: 161326 - DNA, 15 bp, Homo sapiens
ggacaatttctaggc

SEQ ID NO: 161327 - DNA, 15 bp, Homo sapiens
gacaatttctaggca

SEQ ID NO: 161328 - DNA, 15 bp, Homo sapiens
acaatttctaggcat

SEQ ID NO: 161329 - DNA, 15 bp, Homo sapiens
caatttctaggcatt

SEQ ID NO: 161330 - DNA, 15 bp, Homo sapiens
aatttctaggcattt

SEQ ID NO: 161331 - DNA, 15 bp, Homo sapiens
atttctaggcattta

SEQ ID NO: 161332 - DNA, 15 bp, Homo sapiens
tttctaggcatttag

SEQ ID NO: 161333 - DNA, 15 bp, Homo sapiens
ttctaggcatttagc

SEQ ID NO: 161334 - DNA, 15 bp, Homo sapiens
tctaggcatttagca

SEQ ID NO: 161335 - DNA, 15 bp, Homo sapiens
ctaggcatttagcac

SEQ ID NO: 161336 - DNA, 15 bp, Homo sapiens
taggcatttagcacg

SEQ ID NO: 161337 - DNA, 15 bp, Homo sapiens
aggcatttagcacgg

SEQ ID NO: 161338 - DNA, 15 bp, Homo sapiens
ggcatttagcacggg

SEQ ID NO: 161339 - DNA, 15 bp, Homo sapiens
gcatttagcacggga

SEQ ID NO: 161340 - DNA, 15 bp, Homo sapiens
catttagcacgggac

SEQ ID NO: 161341 - DNA, 15 bp, Homo sapiens
atttagcacgggact

SEQ ID NO: 161342 - DNA, 15 bp, Homo sapiens
tttagcacgggacta

SEQ ID NO: 161343 - DNA, 15 bp, Homo sapiens
ttagcacgggactaa

SEQ ID NO: 161344 - DNA, 15 bp, Homo sapiens
tagcacgggactaaa

SEQ ID NO: 161345 - DNA, 15 bp, Homo sapiens
agcacgggactaaaa

SEQ ID NO: 161346 - DNA, 15 bp, Homo sapiens
gcacgggactaaaaa

SEQ ID NO: 161347 - DNA, 15 bp, Homo sapiens
cacgggactaaaaag

SEQ ID NO: 161348 - DNA, 15 bp, Homo sapiens
acgggactaaaaagg

SEQ ID NO: 161349 - DNA, 15 bp, Homo sapiens
cgggactaaaaaggt

SEQ ID NO: 161350 - DNA, 15 bp, Homo sapiens
gggactaaaaaggtc

SEQ ID NO: 161351 - DNA, 15 bp, Homo sapiens
ggactaaaaaggtct

SEQ ID NO: 161352 - DNA, 15 bp, Homo sapiens
gactaaaaaggtctt

SEQ ID NO: 161353 - DNA, 15 bp, Homo sapiens
actaaaaaggtctta

SEQ ID NO: 161354 - DNA, 15 bp, Homo sapiens
ctaaaaaggtcttag

SEQ ID NO: 161355 - DNA, 15 bp, Homo sapiens
taaaaaggtcttaga

SEQ ID NO: 161356 - DNA, 15 bp, Homo sapiens
aaaaaggtcttagag

SEQ ID NO: 161357 - DNA, 15 bp, Homo sapiens
aaaaggtcttagagg

SEQ ID NO: 161358 - DNA, 15 bp, Homo sapiens
aaaggtcttagagga

SEQ ID NO: 161359 - DNA, 15 bp, Homo sapiens
aaggtcttagaggaa

SEQ ID NO: 161360 - DNA, 15 bp, Homo sapiens
aggtcttagaggaaa

SEQ ID NO: 161361 - DNA, 15 bp, Homo sapiens
ggtcttagaggaaat

SEQ ID NO: 161362 - DNA, 15 bp, Homo sapiens
gtcttagaggaaata

SEQ ID NO: 161363 - DNA, 15 bp, Homo sapiens
tcttagaggaaataa

SEQ ID NO: 161364 - DNA, 15 bp, Homo sapiens
cttagaggaaataag

SEQ ID NO: 161365 - DNA, 15 bp, Homo sapiens
ttagaggaaataaga

SEQ ID NO: 161366 - DNA, 15 bp, Homo sapiens
tagaggaaataagaa

SEQ ID NO: 161367 - DNA, 15 bp, Homo sapiens
agaggaaataagaag

SEQ ID NO: 161368 - DNA, 15 bp, Homo sapiens
gaggaaataagaagc

SEQ ID NO: 161369 - DNA, 15 bp, Homo sapiens
aggaaataagaagcg

SEQ ID NO: 161370 - DNA, 15 bp, Homo sapiens
ggaaataagaagcgc

SEQ ID NO: 161371 - DNA, 15 bp, Homo sapiens
gaaataagaagcgcc

SEQ ID NO: 161372 - DNA, 15 bp, Homo sapiens
aaataagaagcgcca

SEQ ID NO: 161373 - DNA, 15 bp, Homo sapiens
aataagaagcgccaa

SEQ ID NO: 161374 - DNA, 15 bp, Homo sapiens
ataagaagcgccaaa

SEQ ID NO: 161375 - DNA, 15 bp, Homo sapiens
taagaagcgccaaaa

SEQ ID NO: 161376 - DNA, 15 bp, Homo sapiens
aagaagcgccaaaac

SEQ ID NO: 161377 - DNA, 15 bp, Homo sapiens
agaagcgccaaaacc

SEQ ID NO: 161378 - DNA, 15 bp, Homo sapiens
gaagcgccaaaacca

SEQ ID NO: 161379 - DNA, 15 bp, Homo sapiens
aagcgccaaaaccat

SEQ ID NO: 161380 - DNA, 15 bp, Homo sapiens
agcgccaaaaccatc

SEQ ID NO: 161381 - DNA, 15 bp, Homo sapiens
gcgccaaaaccatct

SEQ ID NO: 161382 - DNA, 15 bp, Homo sapiens
cgccaaaaccatctc

SEQ ID NO: 161383 - DNA, 15 bp, Homo sapiens
gccaaaaccatctct

SEQ ID NO: 161384 - DNA, 15 bp, Homo sapiens
ccaaaaccatctctt

SEQ ID NO: 161385 - DNA, 15 bp, Homo sapiens
caaaaccatctcttt

SEQ ID NO: 161386 - DNA, 15 bp, Homo sapiens
aaaaccatctctttg

SEQ ID NO: 161387 - DNA, 15 bp, Homo sapiens
aaaccatctctttgc

SEQ ID NO: 161388 - DNA, 15 bp, Homo sapiens
aaccatctctttgca

SEQ ID NO: 161389 - DNA, 15 bp, Homo sapiens
accatctctttgcac

SEQ ID NO: 161390 - DNA, 15 bp, Homo sapiens
ccatctctttgcact

SEQ ID NO: 161391 - DNA, 15 bp, Homo sapiens
catctctttgcactg

SEQ ID NO: 161392 - DNA, 15 bp, Homo sapiens
atctctttgcactgt

SEQ ID NO: 161393 - DNA, 15 bp, Homo sapiens
tctctttgcactgta

SEQ ID NO: 161394 - DNA, 15 bp, Homo sapiens
ctctttgcactgtat

SEQ ID NO: 161395 - DNA, 15 bp, Homo sapiens
tctttgcactgtatt

SEQ ID NO: 161396 - DNA, 15 bp, Homo sapiens
ctttgcactgtattt

SEQ ID NO: 161397 - DNA, 15 bp, Homo sapiens
tttgcactgtatttc

SEQ ID NO: 161398 - DNA, 15 bp, Homo sapiens
ttgcactgtatttca

SEQ ID NO: 161399 - DNA, 15 bp, Homo sapiens
tgcactgtatttcaa

SEQ ID NO: 161400 - DNA, 15 bp, Homo sapiens
gcactgtatttcaac

SEQ ID NO: 161401 - DNA, 15 bp, Homo sapiens
cactgtatttcaacc

SEQ ID NO: 161402 - DNA, 15 bp, Homo sapiens
actgtatttcaaccc

SEQ ID NO: 161403 - DNA, 15 bp, Homo sapiens
ctgtatttcaaccca

SEQ ID NO: 161404 - DNA, 15 bp, Homo sapiens
tgtatttcaacccat

SEQ ID NO: 161405 - DNA, 15 bp, Homo sapiens
gtatttcaacccatt

SEQ ID NO: 161406 - DNA, 15 bp, Homo sapiens
tatttcaacccattt

SEQ ID NO: 161407 - DNA, 15 bp, Homo sapiens
atttcaacccatttg

SEQ ID NO: 161408 - DNA, 15 bp, Homo sapiens
tttcaacccatttgt

SEQ ID NO: 161409 - DNA, 15 bp, Homo sapiens
ttcaacccatttgtc

SEQ ID NO: 161410 - DNA, 15 bp, Homo sapiens
tcaacccatttgtcc

SEQ ID NO: 161411 - DNA, 15 bp, Homo sapiens
caacccatttgtcct

SEQ ID NO: 161412 - DNA, 15 bp, Homo sapiens
aacccatttgtcctt

SEQ ID NO: 161413 - DNA, 15 bp, Homo sapiens
acccatttgtccttc

SEQ ID NO: 161414 - DNA, 15 bp, Homo sapiens
cccatttgtccttct

SEQ ID NO: 161415 - DNA, 15 bp, Homo sapiens
ccatttgtccttctg

SEQ ID NO: 161416 - DNA, 15 bp, Homo sapiens
catttgtccttctgg

SEQ ID NO: 161417 - DNA, 15 bp, Homo sapiens
atttgtccttctggg

SEQ ID NO: 161418 - DNA, 15 bp, Homo sapiens
tttgtccttctgggt

SEQ ID NO: 161419 - DNA, 15 bp, Homo sapiens
ttgtccttctgggtt

SEQ ID NO: 161420 - DNA, 15 bp, Homo sapiens
tgtccttctgggttt

SEQ ID NO: 161421 - DNA, 15 bp, Homo sapiens
gtccttctgggtttt

SEQ ID NO: 161422 - DNA, 15 bp, Homo sapiens
tccttctgggttttg

SEQ ID NO: 161423 - DNA, 15 bp, Homo sapiens
ccttctgggttttga

SEQ ID NO: 161424 - DNA, 15 bp, Homo sapiens
cttctgggttttgaa

SEQ ID NO: 161425 - DNA, 15 bp, Homo sapiens
ttctgggttttgaag

SEQ ID NO: 161426 - DNA, 15 bp, Homo sapiens
tctgggttttgaagg

SEQ ID NO: 161427 - DNA, 15 bp, Homo sapiens
ctgggttttgaagga

SEQ ID NO: 161428 - DNA, 15 bp, Homo sapiens
tgggttttgaaggaa

SEQ ID NO: 161429 - DNA, 15 bp, Homo sapiens
gggttttgaaggaac

SEQ ID NO: 161430 - DNA, 15 bp, Homo sapiens
ggttttgaaggaaca

SEQ ID NO: 161431 - DNA, 15 bp, Homo sapiens
gttttgaaggaacag

SEQ ID NO: 161432 - DNA, 15 bp, Homo sapiens
ttttgaaggaacagg

SEQ ID NO: 161433 - DNA, 15 bp, Homo sapiens
tttgaaggaacaggt

SEQ ID NO: 161434 - DNA, 15 bp, Homo sapiens
ttgaaggaacaggtg

SEQ ID NO: 161435 - DNA, 15 bp, Homo sapiens
tgaaggaacaggtgg

SEQ ID NO: 161436 - DNA, 15 bp, Homo sapiens
gaaggaacaggtggg

SEQ ID NO: 161437 - DNA, 15 bp, Homo sapiens
aaggaacaggtggga

SEQ ID NO: 161438 - DNA, 15 bp, Homo sapiens
aggaacaggtgggac

SEQ ID NO: 161439 - DNA, 15 bp, Homo sapiens
ggaacaggtgggact

SEQ ID NO: 161440 - DNA, 15 bp, Homo sapiens
gaacaggtgggactg

SEQ ID NO: 161441 - DNA, 15 bp, Homo sapiens
aacaggtgggactgg

SEQ ID NO: 161442 - DNA, 15 bp, Homo sapiens
acaggtgggactggg

SEQ ID NO: 161443 - DNA, 15 bp, Homo sapiens
caggtgggactgggg

SEQ ID NO: 161444 - DNA, 15 bp, Homo sapiens
aggtgggactgggga

SEQ ID NO: 161445 - DNA, 15 bp, Homo sapiens
ggtgggactggggac

SEQ ID NO: 161446 - DNA, 15 bp, Homo sapiens
gtgggactggggaca

SEQ ID NO: 161447 - DNA, 15 bp, Homo sapiens
tgggactggggacag

SEQ ID NO: 161448 - DNA, 15 bp, Homo sapiens
gggactggggacaga

SEQ ID NO: 161449 - DNA, 15 bp, Homo sapiens
ggactggggacagaa

SEQ ID NO: 161450 - DNA, 15 bp, Homo sapiens
gactggggacagaag

SEQ ID NO: 161451 - DNA, 15 bp, Homo sapiens
actggggacagaaga

SEQ ID NO: 161452 - DNA, 15 bp, Homo sapiens
ctggggacagaagag

SEQ ID NO: 161453 - DNA, 15 bp, Homo sapiens
tggggacagaagagt

SEQ ID NO: 161454 - DNA, 15 bp, Homo sapiens
ggggacagaagagtt

SEQ ID NO: 161455 - DNA, 15 bp, Homo sapiens
gggacagaagagttc

SEQ ID NO: 161456 - DNA, 15 bp, Homo sapiens
ggacagaagagttct

SEQ ID NO: 161457 - DNA, 15 bp, Homo sapiens
gacagaagagttctt

SEQ ID NO: 161458 - DNA, 15 bp, Homo sapiens
acagaagagttcttg

SEQ ID NO: 161459 - DNA, 15 bp, Homo sapiens
cagaagagttcttga

SEQ ID NO: 161460 - DNA, 15 bp, Homo sapiens
agaagagttcttgaa

SEQ ID NO: 161461 - DNA, 15 bp, Homo sapiens
gaagagttcttgaag

SEQ ID NO: 161462 - DNA, 15 bp, Homo sapiens
aagagttcttgaagc

SEQ ID NO: 161463 - DNA, 15 bp, Homo sapiens
agagttcttgaagcc

SEQ ID NO: 161464 - DNA, 15 bp, Homo sapiens
gagttcttgaagcca

SEQ ID NO: 161465 - DNA, 15 bp, Homo sapiens
agttcttgaagccag

SEQ ID NO: 161466 - DNA, 15 bp, Homo sapiens
gttcttgaagccagt

SEQ ID NO: 161467 - DNA, 15 bp, Homo sapiens
ttcttgaagccagtt

SEQ ID NO: 161468 - DNA, 15 bp, Homo sapiens
tcttgaagccagttt

SEQ ID NO: 161469 - DNA, 15 bp, Homo sapiens
cttgaagccagtttg

SEQ ID NO: 161470 - DNA, 15 bp, Homo sapiens
ttgaagccagtttgt

SEQ ID NO: 161471 - DNA, 15 bp, Homo sapiens
tgaagccagtttgtc

SEQ ID NO: 161472 - DNA, 15 bp, Homo sapiens
gaagccagtttgtcc

SEQ ID NO: 161473 - DNA, 15 bp, Homo sapiens
aagccagtttgtcca

SEQ ID NO: 161474 - DNA, 15 bp, Homo sapiens
agccagtttgtccat

SEQ ID NO: 161475 - DNA, 15 bp, Homo sapiens
gccagtttgtccatc

SEQ ID NO: 161476 - DNA, 15 bp, Homo sapiens
ccagtttgtccatca

SEQ ID NO: 161477 - DNA, 15 bp, Homo sapiens
cagtttgtccatcat

SEQ ID NO: 161478 - DNA, 15 bp, Homo sapiens
agtttgtccatcatg

SEQ ID NO: 161479 - DNA, 15 bp, Homo sapiens
gtttgtccatcatgg

SEQ ID NO: 161480 - DNA, 15 bp, Homo sapiens
tttgtccatcatgga

SEQ ID NO: 161481 - DNA, 15 bp, Homo sapiens
ttgtccatcatggaa

SEQ ID NO: 161482 - DNA, 15 bp, Homo sapiens
tgtccatcatggaaa

SEQ ID NO: 161483 - DNA, 15 bp, Homo sapiens
gtccatcatggaaaa

SEQ ID NO: 161484 - DNA, 15 bp, Homo sapiens
tccatcatggaaaat

SEQ ID NO: 161485 - DNA, 15 bp, Homo sapiens
ccatcatggaaaatg

SEQ ID NO: 161486 - DNA, 15 bp, Homo sapiens
catcatggaaaatga

SEQ ID NO: 161487 - DNA, 15 bp, Homo sapiens
atcatggaaaatgag

SEQ ID NO: 161488 - DNA, 15 bp, Homo sapiens
tcatggaaaatgaga

SEQ ID NO: 161489 - DNA, 15 bp, Homo sapiens
catggaaaatgagat

SEQ ID NO: 161490 - DNA, 15 bp, Homo sapiens
atggaaaatgagata

SEQ ID NO: 161491 - DNA, 15 bp, Homo sapiens
tggaaaatgagatag

SEQ ID NO: 161492 - DNA, 15 bp, Homo sapiens
ggaaaatgagatagg

SEQ ID NO: 161493 - DNA, 15 bp, Homo sapiens
gaaaatgagataggt

SEQ ID NO: 161494 - DNA, 15 bp, Homo sapiens
aaaatgagataggtg

SEQ ID NO: 161495 - DNA, 15 bp, Homo sapiens
aaatgagataggtga

SEQ ID NO: 161496 - DNA, 15 bp, Homo sapiens
aatgagataggtgat

SEQ ID NO: 161497 - DNA, 15 bp, Homo sapiens
atgagataggtgatg

SEQ ID NO: 161498 - DNA, 15 bp, Homo sapiens
tgagataggtgatgt

SEQ ID NO: 161499 - DNA, 15 bp, Homo sapiens
gagataggtgatgtg

SEQ ID NO: 161500 - DNA, 15 bp, Homo sapiens
agataggtgatgtgg

SEQ ID NO: 161501 - DNA, 15 bp, Homo sapiens
gataggtgatgtggc

SEQ ID NO: 161502 - DNA, 15 bp, Homo sapiens
ataggtgatgtggct

SEQ ID NO: 161503 - DNA, 15 bp, Homo sapiens
taggtgatgtggcta

SEQ ID NO: 161504 - DNA, 15 bp, Homo sapiens
aggtgatgtggctac

SEQ ID NO: 161505 - DNA, 15 bp, Homo sapiens
ggtgatgtggctacg

SEQ ID NO: 161506 - DNA, 15 bp, Homo sapiens
gtgatgtggctacgt

SEQ ID NO: 161507 - DNA, 15 bp, Homo sapiens
tgatgtggctacgtc

SEQ ID NO: 161508 - DNA, 15 bp, Homo sapiens
gatgtggctacgtca

SEQ ID NO: 161509 - DNA, 15 bp, Homo sapiens
atgtggctacgtcag

SEQ ID NO: 161510 - DNA, 15 bp, Homo sapiens
tgtggctacgtcagg

SEQ ID NO: 161511 - DNA, 15 bp, Homo sapiens
gtggctacgtcaggg

SEQ ID NO: 161512 - DNA, 15 bp, Homo sapiens
tggctacgtcagggg

SEQ ID NO: 161513 - DNA, 15 bp, Homo sapiens
ggctacgtcaggggg

SEQ ID NO: 161514 - DNA, 15 bp, Homo sapiens
gctacgtcagggggc

SEQ ID NO: 161515 - DNA, 15 bp, Homo sapiens
ctacgtcagggggcc

SEQ ID NO: 161516 - DNA, 15 bp, Homo sapiens
tacgtcagggggccc

SEQ ID NO: 161517 - DNA, 15 bp, Homo sapiens
acgtcagggggcccg

SEQ ID NO: 161518 - DNA, 15 bp, Homo sapiens
cgtcagggggcccga

SEQ ID NO: 161519 - DNA, 15 bp, Homo sapiens
gtcagggggcccgaa

SEQ ID NO: 161520 - DNA, 15 bp, Homo sapiens
tcagggggcccgaag

SEQ ID NO: 161521 - DNA, 15 bp, Homo sapiens
cagggggcccgaagg

SEQ ID NO: 161522 - DNA, 15 bp, Homo sapiens
agggggcccgaaggc

SEQ ID NO: 161523 - DNA, 15 bp, Homo sapiens
gggggcccgaaggct

SEQ ID NO: 161524 - DNA, 15 bp, Homo sapiens
ggggcccgaaggctc

SEQ ID NO: 161525 - DNA, 15 bp, Homo sapiens
gggcccgaaggctcc

SEQ ID NO: 161526 - DNA, 15 bp, Homo sapiens
ggcccgaaggctcct

SEQ ID NO: 161527 - DNA, 15 bp, Homo sapiens
gcccgaaggctcctt

SEQ ID NO: 161528 - DNA, 15 bp, Homo sapiens
cccgaaggctccttg

SEQ ID NO: 161529 - DNA, 15 bp, Homo sapiens
ccgaaggctccttgt

SEQ ID NO: 161530 - DNA, 15 bp, Homo sapiens
cgaaggctccttgtt

SEQ ID NO: 161531 - DNA, 15 bp, Homo sapiens
gaaggctccttgtta

SEQ ID NO: 161532 - DNA, 15 bp, Homo sapiens
aaggctccttgttac

SEQ ID NO: 161533 - DNA, 15 bp, Homo sapiens
aggctccttgttact

SEQ ID NO: 161534 - DNA, 15 bp, Homo sapiens
ggctccttgttactg

SEQ ID NO: 161535 - DNA, 15 bp, Homo sapiens
gctccttgttactga

SEQ ID NO: 161536 - DNA, 15 bp, Homo sapiens
ctccttgttactgat

SEQ ID NO: 161537 - DNA, 15 bp, Homo sapiens
tccttgttactgatt

SEQ ID NO: 161538 - DNA, 15 bp, Homo sapiens
ccttgttactgattt

SEQ ID NO: 161539 - DNA, 15 bp, Homo sapiens
cttgttactgatttc

SEQ ID NO: 161540 - DNA, 15 bp, Homo sapiens
ttgttactgatttcc

SEQ ID NO: 161541 - DNA, 15 bp, Homo sapiens
tgttactgatttccg

SEQ ID NO: 161542 - DNA, 15 bp, Homo sapiens
gttactgatttccgt

SEQ ID NO: 161543 - DNA, 15 bp, Homo sapiens
ttactgatttccgtc

SEQ ID NO: 161544 - DNA, 15 bp, Homo sapiens
tactgatttccgtct

SEQ ID NO: 161545 - DNA, 15 bp, Homo sapiens
actgatttccgtctt

SEQ ID NO: 161546 - DNA, 15 bp, Homo sapiens
ctgatttccgtcttt

SEQ ID NO: 161547 - DNA, 15 bp, Homo sapiens
tgatttccgtctttt

SEQ ID NO: 161548 - DNA, 15 bp, Homo sapiens
gatttccgtcttttc

SEQ ID NO: 161549 - DNA, 15 bp, Homo sapiens
atttccgtcttttct

SEQ ID NO: 161550 - DNA, 15 bp, Homo sapiens
tttccgtcttttctc

SEQ ID NO: 161551 - DNA, 15 bp, Homo sapiens
ttccgtcttttctct

SEQ ID NO: 161552 - DNA, 15 bp, Homo sapiens
tccgtcttttctctc

SEQ ID NO: 161553 - DNA, 15 bp, Homo sapiens
ccgtcttttctctct

SEQ ID NO: 161554 - DNA, 15 bp, Homo sapiens
cgtcttttctctctg

SEQ ID NO: 161555 - DNA, 15 bp, Homo sapiens
gtcttttctctctgc

SEQ ID NO: 161556 - DNA, 15 bp, Homo sapiens
tcttttctctctgcc

SEQ ID NO: 161557 - DNA, 15 bp, Homo sapiens
cttttctctctgcct

SEQ ID NO: 161558 - DNA, 15 bp, Homo sapiens
ttttctctctgcctt

SEQ ID NO: 161559 - DNA, 15 bp, Homo sapiens
tttctctctgccttt

SEQ ID NO: 161560 - DNA, 15 bp, Homo sapiens
ttctctctgcctttt

SEQ ID NO: 161561 - DNA, 15 bp, Homo sapiens
tctctctgccttttc

SEQ ID NO: 161562 - DNA, 15 bp, Homo sapiens
ctctctgccttttcc

SEQ ID NO: 161563 - DNA, 15 bp, Homo sapiens
tctctgccttttccc

SEQ ID NO: 161564 - DNA, 15 bp, Homo sapiens
ctctgccttttcccc

SEQ ID NO: 161565 - DNA, 15 bp, Homo sapiens
tctgccttttcccca

SEQ ID NO: 161566 - DNA, 15 bp, Homo sapiens
ctgccttttccccaa

SEQ ID NO: 161567 - DNA, 15 bp, Homo sapiens
tgccttttccccaag

SEQ ID NO: 161568 - DNA, 15 bp, Homo sapiens
gccttttccccaagg

SEQ ID NO: 161569 - DNA, 15 bp, Homo sapiens
ccttttccccaaggg

SEQ ID NO: 161570 - DNA, 15 bp, Homo sapiens
cttttccccaagggc

SEQ ID NO: 161571 - DNA, 15 bp, Homo sapiens
ttttccccaagggcc

SEQ ID NO: 161572 - DNA, 15 bp, Homo sapiens
tttccccaagggcca

SEQ ID NO: 161573 - DNA, 15 bp, Homo sapiens
ttccccaagggccag

SEQ ID NO: 161574 - DNA, 15 bp, Homo sapiens
tccccaagggccagg

SEQ ID NO: 161575 - DNA, 15 bp, Homo sapiens
ccccaagggccagga

SEQ ID NO: 161576 - DNA, 15 bp, Homo sapiens
cccaagggccaggac

SEQ ID NO: 161577 - DNA, 15 bp, Homo sapiens
ccaagggccaggacc

SEQ ID NO: 161578 - DNA, 15 bp, Homo sapiens
caagggccaggaccc

SEQ ID NO: 161579 - DNA, 15 bp, Homo sapiens
aagggccaggacccc

SEQ ID NO: 161580 - DNA, 15 bp, Homo sapiens
agggccaggacccct

SEQ ID NO: 161581 - DNA, 15 bp, Homo sapiens
gggccaggacccctg

SEQ ID NO: 161582 - DNA, 15 bp, Homo sapiens
ggccaggacccctgg

SEQ ID NO: 161583 - DNA, 15 bp, Homo sapiens
gccaggacccctgga

SEQ ID NO: 161584 - DNA, 15 bp, Homo sapiens
ccaggacccctggat

SEQ ID NO: 161585 - DNA, 15 bp, Homo sapiens
caggacccctggatc

SEQ ID NO: 161586 - DNA, 15 bp, Homo sapiens
aggacccctggatct

SEQ ID NO: 161587 - DNA, 15 bp, Homo sapiens
ggacccctggatctc

SEQ ID NO: 161588 - DNA, 15 bp, Homo sapiens
gacccctggatctct

SEQ ID NO: 161589 - DNA, 15 bp, Homo sapiens
acccctggatctctg

SEQ ID NO: 161590 - DNA, 15 bp, Homo sapiens
cccctggatctctgg

SEQ ID NO: 161591 - DNA, 15 bp, Homo sapiens
ccctggatctctggg

SEQ ID NO: 161592 - DNA, 15 bp, Homo sapiens
cctggatctctgggc

SEQ ID NO: 161593 - DNA, 15 bp, Homo sapiens
ctggatctctgggca

SEQ ID NO: 161594 - DNA, 15 bp, Homo sapiens
tggatctctgggcag

SEQ ID NO: 161595 - DNA, 15 bp, Homo sapiens
ggatctctgggcaga

SEQ ID NO: 161596 - DNA, 15 bp, Homo sapiens
gatctctgggcagag

SEQ ID NO: 161597 - DNA, 15 bp, Homo sapiens
atctctgggcagagc

SEQ ID NO: 161598 - DNA, 15 bp, Homo sapiens
tctctgggcagagca

SEQ ID NO: 161599 - DNA, 15 bp, Homo sapiens
ctctgggcagagcag

SEQ ID NO: 161600 - DNA, 15 bp, Homo sapiens
tctgggcagagcaga

SEQ ID NO: 161601 - DNA, 15 bp, Homo sapiens
ctgggcagagcagac

SEQ ID NO: 161602 - DNA, 15 bp, Homo sapiens
tgggcagagcagacg

SEQ ID NO: 161603 - DNA, 15 bp, Homo sapiens
gggcagagcagacgc

SEQ ID NO: 161604 - DNA, 15 bp, Homo sapiens
ggcagagcagacgca

SEQ ID NO: 161605 - DNA, 15 bp, Homo sapiens
gcagagcagacgcag

SEQ ID NO: 161606 - DNA, 15 bp, Homo sapiens
cagagcagacgcagg

SEQ ID NO: 161607 - DNA, 15 bp, Homo sapiens
agagcagacgcaggc

SEQ ID NO: 161608 - DNA, 15 bp, Homo sapiens
gagcagacgcaggcc

SEQ ID NO: 161609 - DNA, 15 bp, Homo sapiens
agcagacgcaggccc

SEQ ID NO: 161610 - DNA, 15 bp, Homo sapiens
gcagacgcaggcccc

SEQ ID NO: 161611 - DNA, 15 bp, Homo sapiens
cagacgcaggcccct

SEQ ID NO: 161612 - DNA, 15 bp, Homo sapiens
agacgcaggccccta

SEQ ID NO: 161613 - DNA, 15 bp, Homo sapiens
gacgcaggcccctat

SEQ ID NO: 161614 - DNA, 15 bp, Homo sapiens
acgcaggcccctata

SEQ ID NO: 161615 - DNA, 15 bp, Homo sapiens
cgcaggcccctataa

SEQ ID NO: 161616 - DNA, 15 bp, Homo sapiens
gcaggcccctataat

SEQ ID NO: 161617 - DNA, 15 bp, Homo sapiens
caggcccctataata

SEQ ID NO: 161618 - DNA, 15 bp, Homo sapiens
aggcccctataatag

SEQ ID NO: 161619 - DNA, 15 bp, Homo sapiens
ggcccctataatagc

SEQ ID NO: 161620 - DNA, 15 bp, Homo sapiens
gcccctataatagcc

SEQ ID NO: 161621 - DNA, 15 bp, Homo sapiens
cccctataatagccc

SEQ ID NO: 161622 - DNA, 15 bp, Homo sapiens
ccctataatagccct

SEQ ID NO: 161623 - DNA, 15 bp, Homo sapiens
cctataatagccctc

SEQ ID NO: 161624 - DNA, 15 bp, Homo sapiens
ctataatagccctca

SEQ ID NO: 161625 - DNA, 15 bp, Homo sapiens
tataatagccctcat

SEQ ID NO: 161626 - DNA, 15 bp, Homo sapiens
ataatagccctcatg

SEQ ID NO: 161627 - DNA, 15 bp, Homo sapiens
taatagccctcatgc

SEQ ID NO: 161628 - DNA, 15 bp, Homo sapiens
aatagccctcatgct

SEQ ID NO: 161629 - DNA, 15 bp, Homo sapiens
atagccctcatgcta

SEQ ID NO: 161630 - DNA, 15 bp, Homo sapiens
tagccctcatgctag

SEQ ID NO: 161631 - DNA, 15 bp, Homo sapiens
agccctcatgctaga

SEQ ID NO: 161632 - DNA, 15 bp, Homo sapiens
gccctcatgctagaa

SEQ ID NO: 161633 - DNA, 15 bp, Homo sapiens
ccctcatgctagaaa

SEQ ID NO: 161634 - DNA, 15 bp, Homo sapiens
cctcatgctagaaag

SEQ ID NO: 161635 - DNA, 15 bp, Homo sapiens
ctcatgctagaaagg

SEQ ID NO: 161636 - DNA, 15 bp, Homo sapiens
tcatgctagaaagga

SEQ ID NO: 161637 - DNA, 15 bp, Homo sapiens
catgctagaaaggag

SEQ ID NO: 161638 - DNA, 15 bp, Homo sapiens
atgctagaaaggagc

SEQ ID NO: 161639 - DNA, 15 bp, Homo sapiens
tgctagaaaggagcc

SEQ ID NO: 161640 - DNA, 15 bp, Homo sapiens
gctagaaaggagccg

SEQ ID NO: 161641 - DNA, 15 bp, Homo sapiens
ctagaaaggagccgg

SEQ ID NO: 161642 - DNA, 15 bp, Homo sapiens
tagaaaggagccgga

SEQ ID NO: 161643 - DNA, 15 bp, Homo sapiens
agaaaggagccggag

SEQ ID NO: 161644 - DNA, 15 bp, Homo sapiens
gaaaggagccggagc

SEQ ID NO: 161645 - DNA, 15 bp, Homo sapiens
aaaggagccggagcc

SEQ ID NO: 161646 - DNA, 15 bp, Homo sapiens
aaggagccggagcct

SEQ ID NO: 161647 - DNA, 15 bp, Homo sapiens
aggagccggagcctg

SEQ ID NO: 161648 - DNA, 15 bp, Homo sapiens
ggagccggagcctgt

SEQ ID NO: 161649 - DNA, 15 bp, Homo sapiens
gagccggagcctgtg

SEQ ID NO: 161650 - DNA, 15 bp, Homo sapiens
agccggagcctgtgt

SEQ ID NO: 161651 - DNA, 15 bp, Homo sapiens
gccggagcctgtgta

SEQ ID NO: 161652 - DNA, 15 bp, Homo sapiens
ccggagcctgtgtat

SEQ ID NO: 161653 - DNA, 15 bp, Homo sapiens
cggagcctgtgtata

SEQ ID NO: 161654 - DNA, 15 bp, Homo sapiens
ggagcctgtgtataa

SEQ ID NO: 161655 - DNA, 15 bp, Homo sapiens
gagcctgtgtataag

SEQ ID NO: 161656 - DNA, 15 bp, Homo sapiens
agcctgtgtataagg

SEQ ID NO: 161657 - DNA, 15 bp, Homo sapiens
gcctgtgtataaggc

SEQ ID NO: 161658 - DNA, 15 bp, Homo sapiens
cctgtgtataaggcc

SEQ ID NO: 161659 - DNA, 15 bp, Homo sapiens
ctgtgtataaggcca

SEQ ID NO: 161660 - DNA, 15 bp, Homo sapiens
tgtgtataaggccag

SEQ ID NO: 161661 - DNA, 15 bp, Homo sapiens
gtgtataaggccagc

SEQ ID NO: 161662 - DNA, 15 bp, Homo sapiens
tgtataaggccagcg

SEQ ID NO: 161663 - DNA, 15 bp, Homo sapiens
gtataaggccagcgc

SEQ ID NO: 161664 - DNA, 15 bp, Homo sapiens
tataaggccagcgca

SEQ ID NO: 161665 - DNA, 15 bp, Homo sapiens
ataaggccagcgcag

SEQ ID NO: 161666 - DNA, 15 bp, Homo sapiens
taaggccagcgcagc

SEQ ID NO: 161667 - DNA, 15 bp, Homo sapiens
aaggccagcgcagcc

SEQ ID NO: 161668 - DNA, 15 bp, Homo sapiens
aggccagcgcagcct

SEQ ID NO: 161669 - DNA, 15 bp, Homo sapiens
ggccagcgcagccta

SEQ ID NO: 161670 - DNA, 15 bp, Homo sapiens
gccagcgcagcctac

SEQ ID NO: 161671 - DNA, 15 bp, Homo sapiens
ccagcgcagcctact

SEQ ID NO: 161672 - DNA, 15 bp, Homo sapiens
cagcgcagcctactc

SEQ ID NO: 161673 - DNA, 15 bp, Homo sapiens
agcgcagcctactct

SEQ ID NO: 161674 - DNA, 15 bp, Homo sapiens
gcgcagcctactctg

SEQ ID NO: 161675 - DNA, 15 bp, Homo sapiens
cgcagcctactctgg

SEQ ID NO: 161676 - DNA, 15 bp, Homo sapiens
gcagcctactctgga

SEQ ID NO: 161677 - DNA, 15 bp, Homo sapiens
cagcctactctggac

SEQ ID NO: 161678 - DNA, 15 bp, Homo sapiens
agcctactctggaca

SEQ ID NO: 161679 - DNA, 15 bp, Homo sapiens
gcctactctggacag

SEQ ID NO: 161680 - DNA, 15 bp, Homo sapiens
cctactctggacagt

SEQ ID NO: 161681 - DNA, 15 bp, Homo sapiens
ctactctggacagtg

SEQ ID NO: 161682 - DNA, 15 bp, Homo sapiens
tactctggacagtgc

SEQ ID NO: 161683 - DNA, 15 bp, Homo sapiens
actctggacagtgca

SEQ ID NO: 161684 - DNA, 15 bp, Homo sapiens
ctctggacagtgcag

SEQ ID NO: 161685 - DNA, 15 bp, Homo sapiens
tctggacagtgcagg

SEQ ID NO: 161686 - DNA, 15 bp, Homo sapiens
ctggacagtgcaggg

SEQ ID NO: 161687 - DNA, 15 bp, Homo sapiens
tggacagtgcagggt

SEQ ID NO: 161688 - DNA, 15 bp, Homo sapiens
ggacagtgcagggtt

SEQ ID NO: 161689 - DNA, 15 bp, Homo sapiens
gacagtgcagggttc

SEQ ID NO: 161690 - DNA, 15 bp, Homo sapiens
acagtgcagggttcc

SEQ ID NO: 161691 - DNA, 15 bp, Homo sapiens
cagtgcagggttccc

SEQ ID NO: 161692 - DNA, 15 bp, Homo sapiens
agtgcagggttccca

SEQ ID NO: 161693 - DNA, 15 bp, Homo sapiens
gtgcagggttcccac

SEQ ID NO: 161694 - DNA, 15 bp, Homo sapiens
tgcagggttcccact

SEQ ID NO: 161695 - DNA, 15 bp, Homo sapiens
gcagggttcccactc

SEQ ID NO: 161696 - DNA, 15 bp, Homo sapiens
cagggttcccactct

SEQ ID NO: 161697 - DNA, 15 bp, Homo sapiens
agggttcccactctc

SEQ ID NO: 161698 - DNA, 15 bp, Homo sapiens
gggttcccactctcc

SEQ ID NO: 161699 - DNA, 15 bp, Homo sapiens
ggttcccactctccc

SEQ ID NO: 161700 - DNA, 15 bp, Homo sapiens
gttcccactctccca

SEQ ID NO: 161701 - DNA, 15 bp, Homo sapiens
ttcccactctcccaa

SEQ ID NO: 161702 - DNA, 15 bp, Homo sapiens
tcccactctcccaac

SEQ ID NO: 161703 - DNA, 15 bp, Homo sapiens
cccactctcccaact

SEQ ID NO: 161704 - DNA, 15 bp, Homo sapiens
ccactctcccaactc

SEQ ID NO: 161705 - DNA, 15 bp, Homo sapiens
cactctcccaactcc

SEQ ID NO: 161706 - DNA, 15 bp, Homo sapiens
actctcccaactccc

SEQ ID NO: 161707 - DNA, 15 bp, Homo sapiens
ctctcccaactcccc

SEQ ID NO: 161708 - DNA, 15 bp, Homo sapiens
tctcccaactcccca

SEQ ID NO: 161709 - DNA, 15 bp, Homo sapiens
ctcccaactccccat

SEQ ID NO: 161710 - DNA, 15 bp, Homo sapiens
tcccaactccccatc

SEQ ID NO: 161711 - DNA, 15 bp, Homo sapiens
cccaactccccatct

SEQ ID NO: 161712 - DNA, 15 bp, Homo sapiens
ccaactccccatctg

SEQ ID NO: 161713 - DNA, 15 bp, Homo sapiens
caactccccatctgc

SEQ ID NO: 161714 - DNA, 15 bp, Homo sapiens
aactccccatctgct

SEQ ID NO: 161715 - DNA, 15 bp, Homo sapiens
actccccatctgctt

SEQ ID NO: 161716 - DNA, 15 bp, Homo sapiens
ctccccatctgcttg

SEQ ID NO: 161717 - DNA, 15 bp, Homo sapiens
tccccatctgcttgc

SEQ ID NO: 161718 - DNA, 15 bp, Homo sapiens
ccccatctgcttgcc

SEQ ID NO: 161719 - DNA, 15 bp, Homo sapiens
cccatctgcttgcct

SEQ ID NO: 161720 - DNA, 15 bp, Homo sapiens
ccatctgcttgcctc

SEQ ID NO: 161721 - DNA, 15 bp, Homo sapiens
catctgcttgcctcc

SEQ ID NO: 161722 - DNA, 15 bp, Homo sapiens
atctgcttgcctcca

SEQ ID NO: 161723 - DNA, 15 bp, Homo sapiens
tctgcttgcctccag

SEQ ID NO: 161724 - DNA, 15 bp, Homo sapiens
ctgcttgcctccaga

SEQ ID NO: 161725 - DNA, 15 bp, Homo sapiens
tgcttgcctccagac

SEQ ID NO: 161726 - DNA, 15 bp, Homo sapiens
gcttgcctccagacc

SEQ ID NO: 161727 - DNA, 15 bp, Homo sapiens
cttgcctccagaccc

SEQ ID NO: 161728 - DNA, 15 bp, Homo sapiens
ttgcctccagaccca

SEQ ID NO: 161729 - DNA, 15 bp, Homo sapiens
tgcctccagacccac

SEQ ID NO: 161730 - DNA, 15 bp, Homo sapiens
gcctccagacccaca

SEQ ID NO: 161731 - DNA, 15 bp, Homo sapiens
cctccagacccacat

SEQ ID NO: 161732 - DNA, 15 bp, Homo sapiens
ctccagacccacatt

SEQ ID NO: 161733 - DNA, 15 bp, Homo sapiens
tccagacccacattc

SEQ ID NO: 161734 - DNA, 15 bp, Homo sapiens
ccagacccacattca

SEQ ID NO: 161735 - DNA, 15 bp, Homo sapiens
cagacccacattcac

SEQ ID NO: 161736 - DNA, 15 bp, Homo sapiens
agacccacattcaca

SEQ ID NO: 161737 - DNA, 15 bp, Homo sapiens
gacccacattcacac

SEQ ID NO: 161738 - DNA, 15 bp, Homo sapiens
acccacattcacaca

SEQ ID NO: 161739 - DNA, 15 bp, Homo sapiens
cccacattcacacac

SEQ ID NO: 161740 - DNA, 15 bp, Homo sapiens
ccacattcacacacg

SEQ ID NO: 161741 - DNA, 15 bp, Homo sapiens
cacattcacacacga

SEQ ID NO: 161742 - DNA, 15 bp, Homo sapiens
acattcacacacgag

SEQ ID NO: 161743 - DNA, 15 bp, Homo sapiens
cattcacacacgagc

SEQ ID NO: 161744 - DNA, 15 bp, Homo sapiens
attcacacacgagcc

SEQ ID NO: 161745 - DNA, 15 bp, Homo sapiens
ttcacacacgagcca

SEQ ID NO: 161746 - DNA, 15 bp, Homo sapiens
tcacacacgagccac

SEQ ID NO: 161747 - DNA, 15 bp, Homo sapiens
cacacacgagccact

SEQ ID NO: 161748 - DNA, 15 bp, Homo sapiens
acacacgagccactg

SEQ ID NO: 161749 - DNA, 15 bp, Homo sapiens
cacacgagccactgg

SEQ ID NO: 161750 - DNA, 15 bp, Homo sapiens
acacgagccactggg

SEQ ID NO: 161751 - DNA, 15 bp, Homo sapiens
cacgagccactgggt

SEQ ID NO: 161752 - DNA, 15 bp, Homo sapiens
acgagccactgggtt

SEQ ID NO: 161753 - DNA, 15 bp, Homo sapiens
cgagccactgggttg

SEQ ID NO: 161754 - DNA, 15 bp, Homo sapiens
gagccactgggttgg

SEQ ID NO: 161755 - DNA, 15 bp, Homo sapiens
agccactgggttgga

SEQ ID NO: 161756 - DNA, 15 bp, Homo sapiens
gccactgggttggag

SEQ ID NO: 161757 - DNA, 15 bp, Homo sapiens
ccactgggttggagg

SEQ ID NO: 161758 - DNA, 15 bp, Homo sapiens
cactgggttggagga

SEQ ID NO: 161759 - DNA, 15 bp, Homo sapiens
actgggttggaggag

SEQ ID NO: 161760 - DNA, 15 bp, Homo sapiens
ctgggttggaggagc

SEQ ID NO: 161761 - DNA, 15 bp, Homo sapiens
tgggttggaggagca

SEQ ID NO: 161762 - DNA, 15 bp, Homo sapiens
gggttggaggagcat

SEQ ID NO: 161763 - DNA, 15 bp, Homo sapiens
ggttggaggagcatc

SEQ ID NO: 161764 - DNA, 15 bp, Homo sapiens
gttggaggagcatct

SEQ ID NO: 161765 - DNA, 15 bp, Homo sapiens
ttggaggagcatctg

SEQ ID NO: 161766 - DNA, 15 bp, Homo sapiens
tggaggagcatctgt

SEQ ID NO: 161767 - DNA, 15 bp, Homo sapiens
ggaggagcatctgtg

SEQ ID NO: 161768 - DNA, 15 bp, Homo sapiens
gaggagcatctgtga

SEQ ID NO: 161769 - DNA, 15 bp, Homo sapiens
aggagcatctgtgag

SEQ ID NO: 161770 - DNA, 15 bp, Homo sapiens
ggagcatctgtgaga

SEQ ID NO: 161771 - DNA, 15 bp, Homo sapiens
gagcatctgtgagat

SEQ ID NO: 161772 - DNA, 15 bp, Homo sapiens
agcatctgtgagatg

SEQ ID NO: 161773 - DNA, 15 bp, Homo sapiens
gcatctgtgagatga

SEQ ID NO: 161774 - DNA, 15 bp, Homo sapiens
catctgtgagatgaa

SEQ ID NO: 161775 - DNA, 15 bp, Homo sapiens
atctgtgagatgaaa

SEQ ID NO: 161776 - DNA, 15 bp, Homo sapiens
tctgtgagatgaaac

SEQ ID NO: 161777 - DNA, 15 bp, Homo sapiens
ctgtgagatgaaaca

SEQ ID NO: 161778 - DNA, 15 bp, Homo sapiens
tgtgagatgaaacac

SEQ ID NO: 161779 - DNA, 15 bp, Homo sapiens
gtgagatgaaacacc

SEQ ID NO: 161780 - DNA, 15 bp, Homo sapiens
tgagatgaaacacca

SEQ ID NO: 161781 - DNA, 15 bp, Homo sapiens
gagatgaaacaccat

SEQ ID NO: 161782 - DNA, 15 bp, Homo sapiens
agatgaaacaccatt

SEQ ID NO: 161783 - DNA, 15 bp, Homo sapiens
gatgaaacaccattc

SEQ ID NO: 161784 - DNA, 15 bp, Homo sapiens
atgaaacaccattct

SEQ ID NO: 161785 - DNA, 15 bp, Homo sapiens
tgaaacaccattctt

SEQ ID NO: 161786 - DNA, 15 bp, Homo sapiens
gaaacaccattcttt

SEQ ID NO: 161787 - DNA, 15 bp, Homo sapiens
aaacaccattctttc

SEQ ID NO: 161788 - DNA, 15 bp, Homo sapiens
aacaccattctttcc

SEQ ID NO: 161789 - DNA, 15 bp, Homo sapiens
acaccattctttcct

SEQ ID NO: 161790 - DNA, 15 bp, Homo sapiens
caccattctttcctc

SEQ ID NO: 161791 - DNA, 15 bp, Homo sapiens
accattctttcctca

SEQ ID NO: 161792 - DNA, 15 bp, Homo sapiens
ccattctttcctcaa

SEQ ID NO: 161793 - DNA, 15 bp, Homo sapiens
cattctttcctcaat

SEQ ID NO: 161794 - DNA, 15 bp, Homo sapiens
attctttcctcaatg

SEQ ID NO: 161795 - DNA, 15 bp, Homo sapiens
ttctttcctcaatgt

SEQ ID NO: 161796 - DNA, 15 bp, Homo sapiens
tctttcctcaatgtc

SEQ ID NO: 161797 - DNA, 15 bp, Homo sapiens
ctttcctcaatgtct

SEQ ID NO: 161798 - DNA, 15 bp, Homo sapiens
tttcctcaatgtctc

SEQ ID NO: 161799 - DNA, 15 bp, Homo sapiens
ttcctcaatgtctca

SEQ ID NO: 161800 - DNA, 15 bp, Homo sapiens
tcctcaatgtctcag

SEQ ID NO: 161801 - DNA, 15 bp, Homo sapiens
cctcaatgtctcagc

SEQ ID NO: 161802 - DNA, 15 bp, Homo sapiens
ctcaatgtctcagct

SEQ ID NO: 161803 - DNA, 15 bp, Homo sapiens
tcaatgtctcagcta

SEQ ID NO: 161804 - DNA, 15 bp, Homo sapiens
caatgtctcagctat

SEQ ID NO: 161805 - DNA, 15 bp, Homo sapiens
aatgtctcagctatc

SEQ ID NO: 161806 - DNA, 15 bp, Homo sapiens
atgtctcagctatct

SEQ ID NO: 161807 - DNA, 15 bp, Homo sapiens
tgtctcagctatcta

SEQ ID NO: 161808 - DNA, 15 bp, Homo sapiens
gtctcagctatctaa

SEQ ID NO: 161809 - DNA, 15 bp, Homo sapiens
tctcagctatctaac

SEQ ID NO: 161810 - DNA, 15 bp, Homo sapiens
ctcagctatctaact

SEQ ID NO: 161811 - DNA, 15 bp, Homo sapiens
tcagctatctaactg

SEQ ID NO: 161812 - DNA, 15 bp, Homo sapiens
cagctatctaactgt

SEQ ID NO: 161813 - DNA, 15 bp, Homo sapiens
agctatctaactgtg

SEQ ID NO: 161814 - DNA, 15 bp, Homo sapiens
gctatctaactgtgt

SEQ ID NO: 161815 - DNA, 15 bp, Homo sapiens
ctatctaactgtgtg

SEQ ID NO: 161816 - DNA, 15 bp, Homo sapiens
tatctaactgtgtgt

SEQ ID NO: 161817 - DNA, 15 bp, Homo sapiens
atctaactgtgtgtg

SEQ ID NO: 161818 - DNA, 15 bp, Homo sapiens
tctaactgtgtgtgt

SEQ ID NO: 161819 - DNA, 15 bp, Homo sapiens
ctaactgtgtgtgta

SEQ ID NO: 161820 - DNA, 15 bp, Homo sapiens
taactgtgtgtgtaa

SEQ ID NO: 161821 - DNA, 15 bp, Homo sapiens
aactgtgtgtgtaat

SEQ ID NO: 161822 - DNA, 15 bp, Homo sapiens
actgtgtgtgtaatc

SEQ ID NO: 161823 - DNA, 15 bp, Homo sapiens
ctgtgtgtgtaatca

SEQ ID NO: 161824 - DNA, 15 bp, Homo sapiens
tgtgtgtgtaatcag

SEQ ID NO: 161825 - DNA, 15 bp, Homo sapiens
gtgtgtgtaatcagg

SEQ ID NO: 161826 - DNA, 15 bp, Homo sapiens
tgtgtgtaatcaggc

SEQ ID NO: 161827 - DNA, 15 bp, Homo sapiens
gtgtgtaatcaggcc

SEQ ID NO: 161828 - DNA, 15 bp, Homo sapiens
tgtgtaatcaggcca

SEQ ID NO: 161829 - DNA, 15 bp, Homo sapiens
gtgtaatcaggccag

SEQ ID NO: 161830 - DNA, 15 bp, Homo sapiens
tgtaatcaggccagg

SEQ ID NO: 161831 - DNA, 15 bp, Homo sapiens
gtaatcaggccaggt

SEQ ID NO: 161832 - DNA, 15 bp, Homo sapiens
taatcaggccaggtc

SEQ ID NO: 161833 - DNA, 15 bp, Homo sapiens
aatcaggccaggtcc

SEQ ID NO: 161834 - DNA, 15 bp, Homo sapiens
atcaggccaggtcct

SEQ ID NO: 161835 - DNA, 15 bp, Homo sapiens
tcaggccaggtcctc

SEQ ID NO: 161836 - DNA, 15 bp, Homo sapiens
caggccaggtcctcc

SEQ ID NO: 161837 - DNA, 15 bp, Homo sapiens
aggccaggtcctccc

SEQ ID NO: 161838 - DNA, 15 bp, Homo sapiens
ggccaggtcctccct

SEQ ID NO: 161839 - DNA, 15 bp, Homo sapiens
gccaggtcctccctg

SEQ ID NO: 161840 - DNA, 15 bp, Homo sapiens
ccaggtcctccctgc

SEQ ID NO: 161841 - DNA, 15 bp, Homo sapiens
caggtcctccctgct

SEQ ID NO: 161842 - DNA, 15 bp, Homo sapiens
aggtcctccctgctg

SEQ ID NO: 161843 - DNA, 15 bp, Homo sapiens
ggtcctccctgctgg

SEQ ID NO: 161844 - DNA, 15 bp, Homo sapiens
gtcctccctgctggg

SEQ ID NO: 161845 - DNA, 15 bp, Homo sapiens
tcctccctgctgggc

SEQ ID NO: 161846 - DNA, 15 bp, Homo sapiens
cctccctgctgggca

SEQ ID NO: 161847 - DNA, 15 bp, Homo sapiens
ctccctgctgggcag

SEQ ID NO: 161848 - DNA, 15 bp, Homo sapiens
tccctgctgggcaga

SEQ ID NO: 161849 - DNA, 15 bp, Homo sapiens
ccctgctgggcagaa

SEQ ID NO: 161850 - DNA, 15 bp, Homo sapiens
cctgctgggcagaaa

SEQ ID NO: 161851 - DNA, 15 bp, Homo sapiens
ctgctgggcagaaac

SEQ ID NO: 161852 - DNA, 15 bp, Homo sapiens
tgctgggcagaaacc

SEQ ID NO: 161853 - DNA, 15 bp, Homo sapiens
gctgggcagaaacca

SEQ ID NO: 161854 - DNA, 15 bp, Homo sapiens
ctgggcagaaaccat

SEQ ID NO: 161855 - DNA, 15 bp, Homo sapiens
tgggcagaaaccatg

SEQ ID NO: 161856 - DNA, 15 bp, Homo sapiens
gggcagaaaccatgg

SEQ ID NO: 161857 - DNA, 15 bp, Homo sapiens
ggcagaaaccatggg

SEQ ID NO: 161858 - DNA, 15 bp, Homo sapiens
gcagaaaccatggga

SEQ ID NO: 161859 - DNA, 15 bp, Homo sapiens
cagaaaccatgggag

SEQ ID NO: 161860 - DNA, 15 bp, Homo sapiens
agaaaccatgggagt

SEQ ID NO: 161861 - DNA, 15 bp, Homo sapiens
gaaaccatgggagtt

SEQ ID NO: 161862 - DNA, 15 bp, Homo sapiens
aaaccatgggagtta

SEQ ID NO: 161863 - DNA, 15 bp, Homo sapiens
aaccatgggagttaa

SEQ ID NO: 161864 - DNA, 15 bp, Homo sapiens
accatgggagttaag

SEQ ID NO: 161865 - DNA, 15 bp, Homo sapiens
ccatgggagttaaga

SEQ ID NO: 161866 - DNA, 15 bp, Homo sapiens
catgggagttaagag

SEQ ID NO: 161867 - DNA, 15 bp, Homo sapiens
atgggagttaagaga

SEQ ID NO: 161868 - DNA, 15 bp, Homo sapiens
tgggagttaagagat

SEQ ID NO: 161869 - DNA, 15 bp, Homo sapiens
gggagttaagagatt

SEQ ID NO: 161870 - DNA, 15 bp, Homo sapiens
ggagttaagagattg

SEQ ID NO: 161871 - DNA, 15 bp, Homo sapiens
gagttaagagattgc

SEQ ID NO: 161872 - DNA, 15 bp, Homo sapiens
agttaagagattgcc

SEQ ID NO: 161873 - DNA, 15 bp, Homo sapiens
gttaagagattgcca

SEQ ID NO: 161874 - DNA, 15 bp, Homo sapiens
ttaagagattgccaa

SEQ ID NO: 161875 - DNA, 15 bp, Homo sapiens
taagagattgccaac

SEQ ID NO: 161876 - DNA, 15 bp, Homo sapiens
aagagattgccaaca

SEQ ID NO: 161877 - DNA, 15 bp, Homo sapiens
agagattgccaacat

SEQ ID NO: 161878 - DNA, 15 bp, Homo sapiens
gagattgccaacatt

SEQ ID NO: 161879 - DNA, 15 bp, Homo sapiens
agattgccaacattt

SEQ ID NO: 161880 - DNA, 15 bp, Homo sapiens
gattgccaacattta

SEQ ID NO: 161881 - DNA, 15 bp, Homo sapiens
attgccaacatttat

SEQ ID NO: 161882 - DNA, 15 bp, Homo sapiens
ttgccaacatttatt

SEQ ID NO: 161883 - DNA, 15 bp, Homo sapiens
tgccaacatttatta

SEQ ID NO: 161884 - DNA, 15 bp, Homo sapiens
gccaacatttattag

SEQ ID NO: 161885 - DNA, 15 bp, Homo sapiens
ccaacatttattaga

SEQ ID NO: 161886 - DNA, 15 bp, Homo sapiens
caacatttattagag

SEQ ID NO: 161887 - DNA, 15 bp, Homo sapiens
aacatttattagagg

SEQ ID NO: 161888 - DNA, 15 bp, Homo sapiens
acatttattagagga

SEQ ID NO: 161889 - DNA, 15 bp, Homo sapiens
catttattagaggaa

SEQ ID NO: 161890 - DNA, 15 bp, Homo sapiens
atttattagaggaag

SEQ ID NO: 161891 - DNA, 15 bp, Homo sapiens
tttattagaggaagc

SEQ ID NO: 161892 - DNA, 15 bp, Homo sapiens
ttattagaggaagct

SEQ ID NO: 161893 - DNA, 15 bp, Homo sapiens
tattagaggaagctg

SEQ ID NO: 161894 - DNA, 15 bp, Homo sapiens
attagaggaagctga

SEQ ID NO: 161895 - DNA, 15 bp, Homo sapiens
ttagaggaagctgac

SEQ ID NO: 161896 - DNA, 15 bp, Homo sapiens
tagaggaagctgacg

SEQ ID NO: 161897 - DNA, 15 bp, Homo sapiens
agaggaagctgacgt

SEQ ID NO: 161898 - DNA, 15 bp, Homo sapiens
gaggaagctgacgtg

SEQ ID NO: 161899 - DNA, 15 bp, Homo sapiens
aggaagctgacgtgt

SEQ ID NO: 161900 - DNA, 15 bp, Homo sapiens
ggaagctgacgtgta

SEQ ID NO: 161901 - DNA, 15 bp, Homo sapiens
gaagctgacgtgtaa

SEQ ID NO: 161902 - DNA, 15 bp, Homo sapiens
aagctgacgtgtaac

SEQ ID NO: 161903 - DNA, 15 bp, Homo sapiens
agctgacgtgtaact

SEQ ID NO: 161904 - DNA, 15 bp, Homo sapiens
gctgacgtgtaactt

SEQ ID NO: 161905 - DNA, 15 bp, Homo sapiens
ctgacgtgtaacttc

SEQ ID NO: 161906 - DNA, 15 bp, Homo sapiens
tgacgtgtaacttct

SEQ ID NO: 161907 - DNA, 15 bp, Homo sapiens
gacgtgtaacttctc

SEQ ID NO: 161908 - DNA, 15 bp, Homo sapiens
acgtgtaacttctct

SEQ ID NO: 161909 - DNA, 15 bp, Homo sapiens
cgtgtaacttctctg

SEQ ID NO: 161910 - DNA, 15 bp, Homo sapiens
gtgtaacttctctga

SEQ ID NO: 161911 - DNA, 15 bp, Homo sapiens
tgtaacttctctgag

SEQ ID NO: 161912 - DNA, 15 bp, Homo sapiens
gtaacttctctgagg

SEQ ID NO: 161913 - DNA, 15 bp, Homo sapiens
taacttctctgaggc

SEQ ID NO: 161914 - DNA, 15 bp, Homo sapiens
aacttctctgaggca

SEQ ID NO: 161915 - DNA, 15 bp, Homo sapiens
acttctctgaggcaa

SEQ ID NO: 161916 - DNA, 15 bp, Homo sapiens
cttctctgaggcaaa

SEQ ID NO: 161917 - DNA, 15 bp, Homo sapiens
ttctctgaggcaaaa

SEQ ID NO: 161918 - DNA, 15 bp, Homo sapiens
tctctgaggcaaaat

SEQ ID NO: 161919 - DNA, 15 bp, Homo sapiens
ctctgaggcaaaatt

SEQ ID NO: 161920 - DNA, 15 bp, Homo sapiens
tctgaggcaaaattt

SEQ ID NO: 161921 - DNA, 15 bp, Homo sapiens
ctgaggcaaaattta

SEQ ID NO: 161922 - DNA, 15 bp, Homo sapiens
tgaggcaaaatttag

SEQ ID NO: 161923 - DNA, 15 bp, Homo sapiens
gaggcaaaatttagc

SEQ ID NO: 161924 - DNA, 15 bp, Homo sapiens
aggcaaaatttagcc

SEQ ID NO: 161925 - DNA, 15 bp, Homo sapiens
ggcaaaatttagccc

SEQ ID NO: 161926 - DNA, 15 bp, Homo sapiens
gcaaaatttagccct

SEQ ID NO: 161927 - DNA, 15 bp, Homo sapiens
caaaatttagccctc

SEQ ID NO: 161928 - DNA, 15 bp, Homo sapiens
aaaatttagccctcc

SEQ ID NO: 161929 - DNA, 15 bp, Homo sapiens
aaatttagccctcct

SEQ ID NO: 161930 - DNA, 15 bp, Homo sapiens
aatttagccctcctt

SEQ ID NO: 161931 - DNA, 15 bp, Homo sapiens
atttagccctccttt

SEQ ID NO: 161932 - DNA, 15 bp, Homo sapiens
tttagccctcctttg

SEQ ID NO: 161933 - DNA, 15 bp, Homo sapiens
ttagccctcctttga

SEQ ID NO: 161934 - DNA, 15 bp, Homo sapiens
tagccctcctttgaa

SEQ ID NO: 161935 - DNA, 15 bp, Homo sapiens
agccctcctttgaac

SEQ ID NO: 161936 - DNA, 15 bp, Homo sapiens
gccctcctttgaaca

SEQ ID NO: 161937 - DNA, 15 bp, Homo sapiens
ccctcctttgaacag

SEQ ID NO: 161938 - DNA, 15 bp, Homo sapiens
cctcctttgaacagg

SEQ ID NO: 161939 - DNA, 15 bp, Homo sapiens
ctcctttgaacagga

SEQ ID NO: 161940 - DNA, 15 bp, Homo sapiens
tcctttgaacaggaa

SEQ ID NO: 161941 - DNA, 15 bp, Homo sapiens
cctttgaacaggaat

SEQ ID NO: 161942 - DNA, 15 bp, Homo sapiens
ctttgaacaggaatt

SEQ ID NO: 161943 - DNA, 15 bp, Homo sapiens
tttgaacaggaattt

SEQ ID NO: 161944 - DNA, 15 bp, Homo sapiens
ttgaacaggaatttg

SEQ ID NO: 161945 - DNA, 15 bp, Homo sapiens
tgaacaggaatttga

SEQ ID NO: 161946 - DNA, 15 bp, Homo sapiens
gaacaggaatttgac

SEQ ID NO: 161947 - DNA, 15 bp, Homo sapiens
aacaggaatttgact

SEQ ID NO: 161948 - DNA, 15 bp, Homo sapiens
acaggaatttgactc

SEQ ID NO: 161949 - DNA, 15 bp, Homo sapiens
caggaatttgactca

SEQ ID NO: 161950 - DNA, 15 bp, Homo sapiens
aggaatttgactcag

SEQ ID NO: 161951 - DNA, 15 bp, Homo sapiens
ggaatttgactcagt

SEQ ID NO: 161952 - DNA, 15 bp, Homo sapiens
gaatttgactcagtg

SEQ ID NO: 161953 - DNA, 15 bp, Homo sapiens
aatttgactcagtga

SEQ ID NO: 161954 - DNA, 15 bp, Homo sapiens
atttgactcagtgaa

SEQ ID NO: 161955 - DNA, 15 bp, Homo sapiens
tttgactcagtgaac

SEQ ID NO: 161956 - DNA, 15 bp, Homo sapiens
ttgactcagtgaacc

SEQ ID NO: 161957 - DNA, 15 bp, Homo sapiens
tgactcagtgaacct

SEQ ID NO: 161958 - DNA, 15 bp, Homo sapiens
gactcagtgaacctt

SEQ ID NO: 161959 - DNA, 15 bp, Homo sapiens
actcagtgaaccttg

SEQ ID NO: 161960 - DNA, 15 bp, Homo sapiens
ctcagtgaaccttgt

SEQ ID NO: 161961 - DNA, 15 bp, Homo sapiens
tcagtgaaccttgta

SEQ ID NO: 161962 - DNA, 15 bp, Homo sapiens
cagtgaaccttgtac

SEQ ID NO: 161963 - DNA, 15 bp, Homo sapiens
agtgaaccttgtaca

SEQ ID NO: 161964 - DNA, 15 bp, Homo sapiens
gtgaaccttgtacac

SEQ ID NO: 161965 - DNA, 15 bp, Homo sapiens
tgaaccttgtacaca

SEQ ID NO: 161966 - DNA, 15 bp, Homo sapiens
gaaccttgtacacac

SEQ ID NO: 161967 - DNA, 15 bp, Homo sapiens
aaccttgtacacact

SEQ ID NO: 161968 - DNA, 15 bp, Homo sapiens
accttgtacacactc

SEQ ID NO: 161969 - DNA, 15 bp, Homo sapiens
ccttgtacacactcg

SEQ ID NO: 161970 - DNA, 15 bp, Homo sapiens
cttgtacacactcgc

SEQ ID NO: 161971 - DNA, 15 bp, Homo sapiens
ttgtacacactcgca

SEQ ID NO: 161972 - DNA, 15 bp, Homo sapiens
tgtacacactcgcac

SEQ ID NO: 161973 - DNA, 15 bp, Homo sapiens
gtacacactcgcact

SEQ ID NO: 161974 - DNA, 15 bp, Homo sapiens
tacacactcgcactg

SEQ ID NO: 161975 - DNA, 15 bp, Homo sapiens
acacactcgcactga

SEQ ID NO: 161976 - DNA, 15 bp, Homo sapiens
cacactcgcactgag

SEQ ID NO: 161977 - DNA, 15 bp, Homo sapiens
acactcgcactgagt

SEQ ID NO: 161978 - DNA, 15 bp, Homo sapiens
cactcgcactgagtc

SEQ ID NO: 161979 - DNA, 15 bp, Homo sapiens
actcgcactgagtct

SEQ ID NO: 161980 - DNA, 15 bp, Homo sapiens
ctcgcactgagtctg

SEQ ID NO: 161981 - DNA, 15 bp, Homo sapiens
tcgcactgagtctgc

SEQ ID NO: 161982 - DNA, 15 bp, Homo sapiens
cgcactgagtctgct

SEQ ID NO: 161983 - DNA, 15 bp, Homo sapiens
gcactgagtctgctg

SEQ ID NO: 161984 - DNA, 15 bp, Homo sapiens
cactgagtctgctgc

SEQ ID NO: 161985 - DNA, 15 bp, Homo sapiens
actgagtctgctgct

SEQ ID NO: 161986 - DNA, 15 bp, Homo sapiens
ctgagtctgctgctg

SEQ ID NO: 161987 - DNA, 15 bp, Homo sapiens
tgagtctgctgctga

SEQ ID NO: 161988 - DNA, 15 bp, Homo sapiens
gagtctgctgctgat

SEQ ID NO: 161989 - DNA, 15 bp, Homo sapiens
agtctgctgctgatg

SEQ ID NO: 161990 - DNA, 15 bp, Homo sapiens
gtctgctgctgatga

SEQ ID NO: 161991 - DNA, 15 bp, Homo sapiens
tctgctgctgatgat

SEQ ID NO: 161992 - DNA, 15 bp, Homo sapiens
ctgctgctgatgata

SEQ ID NO: 161993 - DNA, 15 bp, Homo sapiens
tgctgctgatgatac

SEQ ID NO: 161994 - DNA, 15 bp, Homo sapiens
gctgctgatgatact

SEQ ID NO: 161995 - DNA, 15 bp, Homo sapiens
ctgctgatgatactg

SEQ ID NO: 161996 - DNA, 15 bp, Homo sapiens
tgctgatgatactgt

SEQ ID NO: 161997 - DNA, 15 bp, Homo sapiens
gctgatgatactgtg

SEQ ID NO: 161998 - DNA, 15 bp, Homo sapiens
ctgatgatactgtgc

SEQ ID NO: 161999 - DNA, 15 bp, Homo sapiens
tgatgatactgtgca

SEQ ID NO: 162000 - DNA, 15 bp, Homo sapiens
gatgatactgtgcac

SEQ ID NO: 162001 - DNA, 15 bp, Homo sapiens
atgatactgtgcacc

SEQ ID NO: 162002 - DNA, 15 bp, Homo sapiens
tgatactgtgcaccc

SEQ ID NO: 162003 - DNA, 15 bp, Homo sapiens
gatactgtgcacccc

SEQ ID NO: 162004 - DNA, 15 bp, Homo sapiens
atactgtgcacccca

SEQ ID NO: 162005 - DNA, 15 bp, Homo sapiens
tactgtgcaccccac

SEQ ID NO: 162006 - DNA, 15 bp, Homo sapiens
actgtgcaccccact

SEQ ID NO: 162007 - DNA, 15 bp, Homo sapiens
ctgtgcaccccactg

SEQ ID NO: 162008 - DNA, 15 bp, Homo sapiens
tgtgcaccccactgt

SEQ ID NO: 162009 - DNA, 15 bp, Homo sapiens
gtgcaccccactgtc

SEQ ID NO: 162010 - DNA, 15 bp, Homo sapiens
tgcaccccactgtct

SEQ ID NO: 162011 - DNA, 15 bp, Homo sapiens
gcaccccactgtctg

SEQ ID NO: 162012 - DNA, 15 bp, Homo sapiens
caccccactgtctgg

SEQ ID NO: 162013 - DNA, 15 bp, Homo sapiens
accccactgtctggg

SEQ ID NO: 162014 - DNA, 15 bp, Homo sapiens
ccccactgtctgggt

SEQ ID NO: 162015 - DNA, 15 bp, Homo sapiens
cccactgtctgggtt

SEQ ID NO: 162016 - DNA, 15 bp, Homo sapiens
ccactgtctgggttt

SEQ ID NO: 162017 - DNA, 15 bp, Homo sapiens
cactgtctgggtttt

SEQ ID NO: 162018 - DNA, 15 bp, Homo sapiens
actgtctgggtttta

SEQ ID NO: 162019 - DNA, 15 bp, Homo sapiens
ctgtctgggttttaa

SEQ ID NO: 162020 - DNA, 15 bp, Homo sapiens
tgtctgggttttaat

SEQ ID NO: 162021 - DNA, 15 bp, Homo sapiens
gtctgggttttaatg

SEQ ID NO: 162022 - DNA, 15 bp, Homo sapiens
tctgggttttaatgt

SEQ ID NO: 162023 - DNA, 15 bp, Homo sapiens
ctgggttttaatgtc

SEQ ID NO: 162024 - DNA, 15 bp, Homo sapiens
tgggttttaatgtca

SEQ ID NO: 162025 - DNA, 15 bp, Homo sapiens
gggttttaatgtcag

SEQ ID NO: 162026 - DNA, 15 bp, Homo sapiens
ggttttaatgtcagg

SEQ ID NO: 162027 - DNA, 15 bp, Homo sapiens
gttttaatgtcaggc

SEQ ID NO: 162028 - DNA, 15 bp, Homo sapiens
ttttaatgtcaggct

SEQ ID NO: 162029 - DNA, 15 bp, Homo sapiens
tttaatgtcaggctg

SEQ ID NO: 162030 - DNA, 15 bp, Homo sapiens
ttaatgtcaggctgt

SEQ ID NO: 162031 - DNA, 15 bp, Homo sapiens
taatgtcaggctgtt

SEQ ID NO: 162032 - DNA, 15 bp, Homo sapiens
aatgtcaggctgttc

SEQ ID NO: 162033 - DNA, 15 bp, Homo sapiens
atgtcaggctgttct

SEQ ID NO: 162034 - DNA, 15 bp, Homo sapiens
tgtcaggctgttctt

SEQ ID NO: 162035 - DNA, 15 bp, Homo sapiens
gtcaggctgttcttt

SEQ ID NO: 162036 - DNA, 15 bp, Homo sapiens
tcaggctgttctttt

SEQ ID NO: 162037 - DNA, 15 bp, Homo sapiens
caggctgttctttta

SEQ ID NO: 162038 - DNA, 15 bp, Homo sapiens
aggctgttcttttag

SEQ ID NO: 162039 - DNA, 15 bp, Homo sapiens
ggctgttcttttagg

SEQ ID NO: 162040 - DNA, 15 bp, Homo sapiens
gctgttcttttaggt

SEQ ID NO: 162041 - DNA, 15 bp, Homo sapiens
ctgttcttttaggta

SEQ ID NO: 162042 - DNA, 15 bp, Homo sapiens
tgttcttttaggtat

SEQ ID NO: 162043 - DNA, 15 bp, Homo sapiens
gttcttttaggtatg

SEQ ID NO: 162044 - DNA, 15 bp, Homo sapiens
ttcttttaggtatgg

SEQ ID NO: 162045 - DNA, 15 bp, Homo sapiens
tcttttaggtatggc

SEQ ID NO: 162046 - DNA, 15 bp, Homo sapiens
cttttaggtatggcg

SEQ ID NO: 162047 - DNA, 15 bp, Homo sapiens
ttttaggtatggcgg

SEQ ID NO: 162048 - DNA, 15 bp, Homo sapiens
tttaggtatggcggc

SEQ ID NO: 162049 - DNA, 15 bp, Homo sapiens
ttaggtatggcggct

SEQ ID NO: 162050 - DNA, 15 bp, Homo sapiens
taggtatggcggctt

SEQ ID NO: 162051 - DNA, 15 bp, Homo sapiens
aggtatggcggcttt

SEQ ID NO: 162052 - DNA, 15 bp, Homo sapiens
ggtatggcggctttt

SEQ ID NO: 162053 - DNA, 15 bp, Homo sapiens
gtatggcggcttttc

SEQ ID NO: 162054 - DNA, 15 bp, Homo sapiens
tatggcggcttttcc

SEQ ID NO: 162055 - DNA, 15 bp, Homo sapiens
atggcggcttttccc

SEQ ID NO: 162056 - DNA, 15 bp, Homo sapiens
tggcggcttttccct

SEQ ID NO: 162057 - DNA, 15 bp, Homo sapiens
ggcggcttttccctg

SEQ ID NO: 162058 - DNA, 15 bp, Homo sapiens
gcggcttttccctgg

SEQ ID NO: 162059 - DNA, 15 bp, Homo sapiens
cggcttttccctggg

SEQ ID NO: 162060 - DNA, 15 bp, Homo sapiens
ggcttttccctgggt

SEQ ID NO: 162061 - DNA, 15 bp, Homo sapiens
gcttttccctgggtg

SEQ ID NO: 162062 - DNA, 15 bp, Homo sapiens
cttttccctgggtgt

SEQ ID NO: 162063 - DNA, 15 bp, Homo sapiens
ttttccctgggtgtc

SEQ ID NO: 162064 - DNA, 15 bp, Homo sapiens
tttccctgggtgtca

SEQ ID NO: 162065 - DNA, 15 bp, Homo sapiens
ttccctgggtgtcag

SEQ ID NO: 162066 - DNA, 15 bp, Homo sapiens
tccctgggtgtcagt

SEQ ID NO: 162067 - DNA, 15 bp, Homo sapiens
ccctgggtgtcagta

SEQ ID NO: 162068 - DNA, 15 bp, Homo sapiens
cctgggtgtcagtaa

SEQ ID NO: 162069 - DNA, 15 bp, Homo sapiens
ctgggtgtcagtaat

SEQ ID NO: 162070 - DNA, 15 bp, Homo sapiens
tgggtgtcagtaata

SEQ ID NO: 162071 - DNA, 15 bp, Homo sapiens
gggtgtcagtaatac

SEQ ID NO: 162072 - DNA, 15 bp, Homo sapiens
ggtgtcagtaatact

SEQ ID NO: 162073 - DNA, 15 bp, Homo sapiens
gtgtcagtaatactc

SEQ ID NO: 162074 - DNA, 15 bp, Homo sapiens
tgtcagtaatactca

SEQ ID NO: 162075 - DNA, 15 bp, Homo sapiens
gtcagtaatactcaa

SEQ ID NO: 162076 - DNA, 15 bp, Homo sapiens
tcagtaatactcaag

SEQ ID NO: 162077 - DNA, 15 bp, Homo sapiens
cagtaatactcaagc

SEQ ID NO: 162078 - DNA, 15 bp, Homo sapiens
agtaatactcaagca

SEQ ID NO: 162079 - DNA, 15 bp, Homo sapiens
gtaatactcaagcac

SEQ ID NO: 162080 - DNA, 15 bp, Homo sapiens
taatactcaagcact

SEQ ID NO: 162081 - DNA, 15 bp, Homo sapiens
aatactcaagcactt

SEQ ID NO: 162082 - DNA, 15 bp, Homo sapiens
atactcaagcacttc

SEQ ID NO: 162083 - DNA, 15 bp, Homo sapiens
tactcaagcacttcc

SEQ ID NO: 162084 - DNA, 15 bp, Homo sapiens
actcaagcacttcct

SEQ ID NO: 162085 - DNA, 15 bp, Homo sapiens
ctcaagcacttcctc

SEQ ID NO: 162086 - DNA, 15 bp, Homo sapiens
tcaagcacttcctcc

SEQ ID NO: 162087 - DNA, 15 bp, Homo sapiens
caagcacttcctccg

SEQ ID NO: 162088 - DNA, 15 bp, Homo sapiens
aagcacttcctccga

SEQ ID NO: 162089 - DNA, 15 bp, Homo sapiens
agcacttcctccgag

SEQ ID NO: 162090 - DNA, 15 bp, Homo sapiens
gcacttcctccgagt

SEQ ID NO: 162091 - DNA, 15 bp, Homo sapiens
cacttcctccgagtc

SEQ ID NO: 162092 - DNA, 15 bp, Homo sapiens
acttcctccgagtca

SEQ ID NO: 162093 - DNA, 15 bp, Homo sapiens
cttcctccgagtcaa

SEQ ID NO: 162094 - DNA, 15 bp, Homo sapiens
ttcctccgagtcaag

SEQ ID NO: 162095 - DNA, 15 bp, Homo sapiens
tcctccgagtcaaga

SEQ ID NO: 162096 - DNA, 15 bp, Homo sapiens
cctccgagtcaagaa

SEQ ID NO: 162097 - DNA, 15 bp, Homo sapiens
ctccgagtcaagaag

SEQ ID NO: 162098 - DNA, 15 bp, Homo sapiens
tccgagtcaagaagt

SEQ ID NO: 162099 - DNA, 15 bp, Homo sapiens
ccgagtcaagaagtt

SEQ ID NO: 162100 - DNA, 15 bp, Homo sapiens
cgagtcaagaagtta

SEQ ID NO: 162101 - DNA, 15 bp, Homo sapiens
gagtcaagaagttaa

SEQ ID NO: 162102 - DNA, 15 bp, Homo sapiens
agtcaagaagttaat

SEQ ID NO: 162103 - DNA, 15 bp, Homo sapiens
gtcaagaagttaatg

SEQ ID NO: 162104 - DNA, 15 bp, Homo sapiens
tcaagaagttaatga

SEQ ID NO: 162105 - DNA, 15 bp, Homo sapiens
caagaagttaatgat

SEQ ID NO: 162106 - DNA, 15 bp, Homo sapiens
aagaagttaatgatg

SEQ ID NO: 162107 - DNA, 15 bp, Homo sapiens
agaagttaatgatgc

SEQ ID NO: 162108 - DNA, 15 bp, Homo sapiens
gaagttaatgatgcc

SEQ ID NO: 162109 - DNA, 15 bp, Homo sapiens
aagttaatgatgcca

SEQ ID NO: 162110 - DNA, 15 bp, Homo sapiens
agttaatgatgccat

SEQ ID NO: 162111 - DNA, 15 bp, Homo sapiens
gttaatgatgccatc

SEQ ID NO: 162112 - DNA, 15 bp, Homo sapiens
ttaatgatgccatca

SEQ ID NO: 162113 - DNA, 15 bp, Homo sapiens
taatgatgccatcaa

SEQ ID NO: 162114 - DNA, 15 bp, Homo sapiens
aatgatgccatcaaa

SEQ ID NO: 162115 - DNA, 15 bp, Homo sapiens
atgatgccatcaaac

SEQ ID NO: 162116 - DNA, 15 bp, Homo sapiens
tgatgccatcaaaca

SEQ ID NO: 162117 - DNA, 15 bp, Homo sapiens
gatgccatcaaacaa

SEQ ID NO: 162118 - DNA, 15 bp, Homo sapiens
atgccatcaaacaaa

SEQ ID NO: 162119 - DNA, 15 bp, Homo sapiens
tgccatcaaacaaat

SEQ ID NO: 162120 - DNA, 15 bp, Homo sapiens
gccatcaaacaaatg

SEQ ID NO: 162121 - DNA, 15 bp, Homo sapiens
ccatcaaacaaatga

SEQ ID NO: 162122 - DNA, 15 bp, Homo sapiens
catcaaacaaatgaa

SEQ ID NO: 162123 - DNA, 15 bp, Homo sapiens
atcaaacaaatgaag

SEQ ID NO: 162124 - DNA, 15 bp, Homo sapiens
tcaaacaaatgaaga

SEQ ID NO: 162125 - DNA, 15 bp, Homo sapiens
caaacaaatgaagaa

SEQ ID NO: 162126 - DNA, 15 bp, Homo sapiens
aaacaaatgaagaaa

SEQ ID NO: 162127 - DNA, 15 bp, Homo sapiens
aacaaatgaagaaac

SEQ ID NO: 162128 - DNA, 15 bp, Homo sapiens
acaaatgaagaaaca

SEQ ID NO: 162129 - DNA, 15 bp, Homo sapiens
caaatgaagaaacac

SEQ ID NO: 162130 - DNA, 15 bp, Homo sapiens
aaatgaagaaacacc

SEQ ID NO: 162131 - DNA, 15 bp, Homo sapiens
aatgaagaaacacct

SEQ ID NO: 162132 - DNA, 15 bp, Homo sapiens
atgaagaaacaccta

SEQ ID NO: 162133 - DNA, 15 bp, Homo sapiens
tgaagaaacacctaa

SEQ ID NO: 162134 - DNA, 15 bp, Homo sapiens
gaagaaacacctaaa

SEQ ID NO: 162135 - DNA, 15 bp, Homo sapiens
aagaaacacctaaag

SEQ ID NO: 162136 - DNA, 15 bp, Homo sapiens
agaaacacctaaagc

SEQ ID NO: 162137 - DNA, 15 bp, Homo sapiens
gaaacacctaaagct

SEQ ID NO: 162138 - DNA, 15 bp, Homo sapiens
aaacacctaaagctg

SEQ ID NO: 162139 - DNA, 15 bp, Homo sapiens
aacacctaaagctgg

SEQ ID NO: 162140 - DNA, 15 bp, Homo sapiens
acacctaaagctggc

SEQ ID NO: 162141 - DNA, 15 bp, Homo sapiens
cacctaaagctggcc

SEQ ID NO: 162142 - DNA, 15 bp, Homo sapiens
acctaaagctggcca

SEQ ID NO: 162143 - DNA, 15 bp, Homo sapiens
cctaaagctggccaa

SEQ ID NO: 162144 - DNA, 15 bp, Homo sapiens
ctaaagctggccaag

SEQ ID NO: 162145 - DNA, 15 bp, Homo sapiens
taaagctggccaagg

SEQ ID NO: 162146 - DNA, 15 bp, Homo sapiens
aaagctggccaaggt

SEQ ID NO: 162147 - DNA, 15 bp, Homo sapiens
aagctggccaaggta

SEQ ID NO: 162148 - DNA, 15 bp, Homo sapiens
agctggccaaggtaa

SEQ ID NO: 162149 - DNA, 15 bp, Homo sapiens
gctggccaaggtaaa

SEQ ID NO: 162150 - DNA, 15 bp, Homo sapiens
ctggccaaggtaaaa

SEQ ID NO: 162151 - DNA, 15 bp, Homo sapiens
tggccaaggtaaaat

SEQ ID NO: 162152 - DNA, 15 bp, Homo sapiens
ggccaaggtaaaata

SEQ ID NO: 162153 - DNA, 15 bp, Homo sapiens
gccaaggtaaaatat

SEQ ID NO: 162154 - DNA, 15 bp, Homo sapiens
ccaaggtaaaatatc

SEQ ID NO: 162155 - DNA, 15 bp, Homo sapiens
caaggtaaaatatct

SEQ ID NO: 162156 - DNA, 15 bp, Homo sapiens
aaggtaaaatatcta

SEQ ID NO: 162157 - DNA, 15 bp, Homo sapiens
aggtaaaatatctat

SEQ ID NO: 162158 - DNA, 15 bp, Homo sapiens
ggtaaaatatctatc

SEQ ID NO: 162159 - DNA, 15 bp, Homo sapiens
gtaaaatatctatcg

SEQ ID NO: 162160 - DNA, 15 bp, Homo sapiens
taaaatatctatcgt

SEQ ID NO: 162161 - DNA, 15 bp, Homo sapiens
aaaatatctatcgta

SEQ ID NO: 162162 - DNA, 15 bp, Homo sapiens
aaatatctatcgtaa

SEQ ID NO: 162163 - DNA, 15 bp, Homo sapiens
aatatctatcgtaag

SEQ ID NO: 162164 - DNA, 15 bp, Homo sapiens
atatctatcgtaaga

SEQ ID NO: 162165 - DNA, 15 bp, Homo sapiens
tatctatcgtaagat

SEQ ID NO: 162166 - DNA, 15 bp, Homo sapiens
atctatcgtaagatg

SEQ ID NO: 162167 - DNA, 15 bp, Homo sapiens
tctatcgtaagatgt

SEQ ID NO: 162168 - DNA, 15 bp, Homo sapiens
ctatcgtaagatgta

SEQ ID NO: 162169 - DNA, 15 bp, Homo sapiens
tatcgtaagatgtat

SEQ ID NO: 162170 - DNA, 15 bp, Homo sapiens
atcgtaagatgtatc

SEQ ID NO: 162171 - DNA, 15 bp, Homo sapiens
tcgtaagatgtatca

SEQ ID NO: 162172 - DNA, 15 bp, Homo sapiens
cgtaagatgtatcag

SEQ ID NO: 162173 - DNA, 15 bp, Homo sapiens
gtaagatgtatcaga

SEQ ID NO: 162174 - DNA, 15 bp, Homo sapiens
taagatgtatcagaa

SEQ ID NO: 162175 - DNA, 15 bp, Homo sapiens
aagatgtatcagaaa

SEQ ID NO: 162176 - DNA, 15 bp, Homo sapiens
agatgtatcagaaaa

SEQ ID NO: 162177 - DNA, 15 bp, Homo sapiens
gatgtatcagaaaaa

SEQ ID NO: 162178 - DNA, 15 bp, Homo sapiens
atgtatcagaaaaat

SEQ ID NO: 162179 - DNA, 15 bp, Homo sapiens
tgtatcagaaaaatg

SEQ ID NO: 162180 - DNA, 15 bp, Homo sapiens
gtatcagaaaaatgg

SEQ ID NO: 162181 - DNA, 15 bp, Homo sapiens
tatcagaaaaatggg

SEQ ID NO: 162182 - DNA, 15 bp, Homo sapiens
atcagaaaaatgggc

SEQ ID NO: 162183 - DNA, 15 bp, Homo sapiens
tcagaaaaatgggca

SEQ ID NO: 162184 - DNA, 15 bp, Homo sapiens
cagaaaaatgggcat

SEQ ID NO: 162185 - DNA, 15 bp, Homo sapiens
agaaaaatgggcatg

SEQ ID NO: 162186 - DNA, 15 bp, Homo sapiens
gaaaaatgggcatgt

SEQ ID NO: 162187 - DNA, 15 bp, Homo sapiens
aaaaatgggcatgta

SEQ ID NO: 162188 - DNA, 15 bp, Homo sapiens
aaaatgggcatgtag

SEQ ID NO: 162189 - DNA, 15 bp, Homo sapiens
aaatgggcatgtagc

SEQ ID NO: 162190 - DNA, 15 bp, Homo sapiens
aatgggcatgtagct

SEQ ID NO: 162191 - DNA, 15 bp, Homo sapiens
atgggcatgtagctg

SEQ ID NO: 162192 - DNA, 15 bp, Homo sapiens
tgggcatgtagctgc

SEQ ID NO: 162193 - DNA, 15 bp, Homo sapiens
gggcatgtagctgct

SEQ ID NO: 162194 - DNA, 15 bp, Homo sapiens
ggcatgtagctgctg

SEQ ID NO: 162195 - DNA, 15 bp, Homo sapiens
gcatgtagctgctgg

SEQ ID NO: 162196 - DNA, 15 bp, Homo sapiens
catgtagctgctggg

SEQ ID NO: 162197 - DNA, 15 bp, Homo sapiens
atgtagctgctggga

SEQ ID NO: 162198 - DNA, 15 bp, Homo sapiens
tgtagctgctgggat

SEQ ID NO: 162199 - DNA, 15 bp, Homo sapiens
gtagctgctgggata

SEQ ID NO: 162200 - DNA, 15 bp, Homo sapiens
tagctgctgggatat

SEQ ID NO: 162201 - DNA, 15 bp, Homo sapiens
agctgctgggatata

SEQ ID NO: 162202 - DNA, 15 bp, Homo sapiens
gctgctgggatatag

SEQ ID NO: 162203 - DNA, 15 bp, Homo sapiens
ctgctgggatatagg

SEQ ID NO: 162204 - DNA, 15 bp, Homo sapiens
tgctgggatatagga

SEQ ID NO: 162205 - DNA, 15 bp, Homo sapiens
gctgggatataggag

SEQ ID NO: 162206 - DNA, 15 bp, Homo sapiens
ctgggatataggagt

SEQ ID NO: 162207 - DNA, 15 bp, Homo sapiens
tgggatataggagta

SEQ ID NO: 162208 - DNA, 15 bp, Homo sapiens
gggatataggagtag

SEQ ID NO: 162209 - DNA, 15 bp, Homo sapiens
ggatataggagtagt

SEQ ID NO: 162210 - DNA, 15 bp, Homo sapiens
gatataggagtagtt

SEQ ID NO: 162211 - DNA, 15 bp, Homo sapiens
atataggagtagttg

SEQ ID NO: 162212 - DNA, 15 bp, Homo sapiens
tataggagtagttgg

SEQ ID NO: 162213 - DNA, 15 bp, Homo sapiens
ataggagtagttggc

SEQ ID NO: 162214 - DNA, 15 bp, Homo sapiens
taggagtagttggca

SEQ ID NO: 162215 - DNA, 15 bp, Homo sapiens
aggagtagttggcag

SEQ ID NO: 162216 - DNA, 15 bp, Homo sapiens
ggagtagttggcagg

SEQ ID NO: 162217 - DNA, 15 bp, Homo sapiens
gagtagttggcaggt

SEQ ID NO: 162218 - DNA, 15 bp, Homo sapiens
agtagttggcaggtt

SEQ ID NO: 162219 - DNA, 15 bp, Homo sapiens
gtagttggcaggtta

SEQ ID NO: 162220 - DNA, 15 bp, Homo sapiens
tagttggcaggttaa

SEQ ID NO: 162221 - DNA, 15 bp, Homo sapiens
agttggcaggttaaa

SEQ ID NO: 162222 - DNA, 15 bp, Homo sapiens
gttggcaggttaaac

SEQ ID NO: 162223 - DNA, 15 bp, Homo sapiens
ttggcaggttaaacg

SEQ ID NO: 162224 - DNA, 15 bp, Homo sapiens
tggcaggttaaacgg

SEQ ID NO: 162225 - DNA, 15 bp, Homo sapiens
ggcaggttaaacgga

SEQ ID NO: 162226 - DNA, 15 bp, Homo sapiens
gcaggttaaacggat

SEQ ID NO: 162227 - DNA, 15 bp, Homo sapiens
caggttaaacggatc

SEQ ID NO: 162228 - DNA, 15 bp, Homo sapiens
aggttaaacggatca

SEQ ID NO: 162229 - DNA, 15 bp, Homo sapiens
ggttaaacggatcac

SEQ ID NO: 162230 - DNA, 15 bp, Homo sapiens
gttaaacggatcacc

SEQ ID NO: 162231 - DNA, 15 bp, Homo sapiens
ttaaacggatcacct

SEQ ID NO: 162232 - DNA, 15 bp, Homo sapiens
taaacggatcacctg

SEQ ID NO: 162233 - DNA, 15 bp, Homo sapiens
aaacggatcacctgg

SEQ ID NO: 162234 - DNA, 15 bp, Homo sapiens
aacggatcacctggc

SEQ ID NO: 162235 - DNA, 15 bp, Homo sapiens
acggatcacctggca

SEQ ID NO: 162236 - DNA, 15 bp, Homo sapiens
cggatcacctggcag

SEQ ID NO: 162237 - DNA, 15 bp, Homo sapiens
ggatcacctggcagc

SEQ ID NO: 162238 - DNA, 15 bp, Homo sapiens
gatcacctggcagct

SEQ ID NO: 162239 - DNA, 15 bp, Homo sapiens
atcacctggcagctc

SEQ ID NO: 162240 - DNA, 15 bp, Homo sapiens
tcacctggcagctca

SEQ ID NO: 162241 - DNA, 15 bp, Homo sapiens
cacctggcagctcat

SEQ ID NO: 162242 - DNA, 15 bp, Homo sapiens
acctggcagctcatt

SEQ ID NO: 162243 - DNA, 15 bp, Homo sapiens
cctggcagctcattg

SEQ ID NO: 162244 - DNA, 15 bp, Homo sapiens
ctggcagctcattgt

SEQ ID NO: 162245 - DNA, 15 bp, Homo sapiens
tggcagctcattgtt

SEQ ID NO: 162246 - DNA, 15 bp, Homo sapiens
ggcagctcattgttc

SEQ ID NO: 162247 - DNA, 15 bp, Homo sapiens
gcagctcattgttct

SEQ ID NO: 162248 - DNA, 15 bp, Homo sapiens
cagctcattgttctg

SEQ ID NO: 162249 - DNA, 15 bp, Homo sapiens
agctcattgttctga

SEQ ID NO: 162250 - DNA, 15 bp, Homo sapiens
gctcattgttctgaa

SEQ ID NO: 162251 - DNA, 15 bp, Homo sapiens
ctcattgttctgaat

SEQ ID NO: 162252 - DNA, 15 bp, Homo sapiens
tcattgttctgaata

SEQ ID NO: 162253 - DNA, 15 bp, Homo sapiens
cattgttctgaatat

SEQ ID NO: 162254 - DNA, 15 bp, Homo sapiens
attgttctgaatatg

SEQ ID NO: 162255 - DNA, 15 bp, Homo sapiens
ttgttctgaatatgt

SEQ ID NO: 162256 - DNA, 15 bp, Homo sapiens
tgttctgaatatgtt

SEQ ID NO: 162257 - DNA, 15 bp, Homo sapiens
gttctgaatatgttg

SEQ ID NO: 162258 - DNA, 15 bp, Homo sapiens
ttctgaatatgttgg

SEQ ID NO: 162259 - DNA, 15 bp, Homo sapiens
tctgaatatgttggc

SEQ ID NO: 162260 - DNA, 15 bp, Homo sapiens
ctgaatatgttggca

SEQ ID NO: 162261 - DNA, 15 bp, Homo sapiens
tgaatatgttggcat

SEQ ID NO: 162262 - DNA, 15 bp, Homo sapiens
gaatatgttggcata

SEQ ID NO: 162263 - DNA, 15 bp, Homo sapiens
aatatgttggcatac

SEQ ID NO: 162264 - DNA, 15 bp, Homo sapiens
atatgttggcataca

SEQ ID NO: 162265 - DNA, 15 bp, Homo sapiens
tatgttggcatacag

SEQ ID NO: 162266 - DNA, 15 bp, Homo sapiens
atgttggcatacaga

SEQ ID NO: 162267 - DNA, 15 bp, Homo sapiens
tgttggcatacagag

SEQ ID NO: 162268 - DNA, 15 bp, Homo sapiens
gttggcatacagagc

SEQ ID NO: 162269 - DNA, 15 bp, Homo sapiens
ttggcatacagagcc

SEQ ID NO: 162270 - DNA, 15 bp, Homo sapiens
tggcatacagagccg

SEQ ID NO: 162271 - DNA, 15 bp, Homo sapiens
ggcatacagagccgt

SEQ ID NO: 162272 - DNA, 15 bp, Homo sapiens
gcatacagagccgtc

SEQ ID NO: 162273 - DNA, 15 bp, Homo sapiens
catacagagccgtct

SEQ ID NO: 162274 - DNA, 15 bp, Homo sapiens
atacagagccgtctt

SEQ ID NO: 162275 - DNA, 15 bp, Homo sapiens
tacagagccgtcttt

SEQ ID NO: 162276 - DNA, 15 bp, Homo sapiens
acagagccgtctttg

SEQ ID NO: 162277 - DNA, 15 bp, Homo sapiens
cagagccgtctttgg

SEQ ID NO: 162278 - DNA, 15 bp, Homo sapiens
agagccgtctttggc

SEQ ID NO: 162279 - DNA, 15 bp, Homo sapiens
gagccgtctttggca

SEQ ID NO: 162280 - DNA, 15 bp, Homo sapiens
agccgtctttggcat

SEQ ID NO: 162281 - DNA, 15 bp, Homo sapiens
gccgtctttggcatt

SEQ ID NO: 162282 - DNA, 15 bp, Homo sapiens
ccgtctttggcattt

SEQ ID NO: 162283 - DNA, 15 bp, Homo sapiens
cgtctttggcattta

SEQ ID NO: 162284 - DNA, 15 bp, Homo sapiens
gtctttggcatttag

SEQ ID NO: 162285 - DNA, 15 bp, Homo sapiens
tctttggcatttagc

SEQ ID NO: 162286 - DNA, 15 bp, Homo sapiens
ctttggcatttagcg

SEQ ID NO: 162287 - DNA, 15 bp, Homo sapiens
tttggcatttagcga

SEQ ID NO: 162288 - DNA, 15 bp, Homo sapiens
ttggcatttagcgat

SEQ ID NO: 162289 - DNA, 15 bp, Homo sapiens
tggcatttagcgatt

SEQ ID NO: 162290 - DNA, 15 bp, Homo sapiens
ggcatttagcgattt

SEQ ID NO: 162291 - DNA, 15 bp, Homo sapiens
gcatttagcgatttg

SEQ ID NO: 162292 - DNA, 15 bp, Homo sapiens
catttagcgatttga

SEQ ID NO: 162293 - DNA, 15 bp, Homo sapiens
atttagcgatttgag

SEQ ID NO: 162294 - DNA, 15 bp, Homo sapiens
tttagcgatttgagc

SEQ ID NO: 162295 - DNA, 15 bp, Homo sapiens
ttagcgatttgagcc

SEQ ID NO: 162296 - DNA, 15 bp, Homo sapiens
tagcgatttgagcca

SEQ ID NO: 162297 - DNA, 15 bp, Homo sapiens
agcgatttgagccag

SEQ ID NO: 162298 - DNA, 15 bp, Homo sapiens
gcgatttgagccaga

SEQ ID NO: 162299 - DNA, 15 bp, Homo sapiens
cgatttgagccagac

SEQ ID NO: 162300 - DNA, 15 bp, Homo sapiens
gatttgagccagaca

SEQ ID NO: 162301 - DNA, 15 bp, Homo sapiens
atttgagccagacaa

SEQ ID NO: 162302 - DNA, 15 bp, Homo sapiens
tttgagccagacaaa

SEQ ID NO: 162303 - DNA, 15 bp, Homo sapiens
ttgagccagacaaaa

SEQ ID NO: 162304 - DNA, 15 bp, Homo sapiens
tgagccagacaaaac

SEQ ID NO: 162305 - DNA, 15 bp, Homo sapiens
gagccagacaaaact

SEQ ID NO: 162306 - DNA, 15 bp, Homo sapiens
agccagacaaaactg

SEQ ID NO: 162307 - DNA, 15 bp, Homo sapiens
gccagacaaaactga

SEQ ID NO: 162308 - DNA, 15 bp, Homo sapiens
ccagacaaaactgaa

SEQ ID NO: 162309 - DNA, 15 bp, Homo sapiens
cagacaaaactgaat

SEQ ID NO: 162310 - DNA, 15 bp, Homo sapiens
agacaaaactgaatt

SEQ ID NO: 162311 - DNA, 15 bp, Homo sapiens
gacaaaactgaatta

SEQ ID NO: 162312 - DNA, 15 bp, Homo sapiens
acaaaactgaattac

SEQ ID NO: 162313 - DNA, 15 bp, Homo sapiens
caaaactgaattact

SEQ ID NO: 162314 - DNA, 15 bp, Homo sapiens
aaaactgaattactt

SEQ ID NO: 162315 - DNA, 15 bp, Homo sapiens
aaactgaattactta

SEQ ID NO: 162316 - DNA, 15 bp, Homo sapiens
aactgaattacttag

SEQ ID NO: 162317 - DNA, 15 bp, Homo sapiens
actgaattacttagt

SEQ ID NO: 162318 - DNA, 15 bp, Homo sapiens
ctgaattacttagtt

SEQ ID NO: 162319 - DNA, 15 bp, Homo sapiens
tgaattacttagttg

SEQ ID NO: 162320 - DNA, 15 bp, Homo sapiens
gaattacttagttgt

SEQ ID NO: 162321 - DNA, 15 bp, Homo sapiens
aattacttagttgta

SEQ ID NO: 162322 - DNA, 15 bp, Homo sapiens
attacttagttgtac

SEQ ID NO: 162323 - DNA, 15 bp, Homo sapiens
ttacttagttgtacg

SEQ ID NO: 162324 - DNA, 15 bp, Homo sapiens
tacttagttgtacgt

SEQ ID NO: 162325 - DNA, 15 bp, Homo sapiens
acttagttgtacgtt

SEQ ID NO: 162326 - DNA, 15 bp, Homo sapiens
cttagttgtacgttt

SEQ ID NO: 162327 - DNA, 15 bp, Homo sapiens
ttagttgtacgttta

SEQ ID NO: 162328 - DNA, 15 bp, Homo sapiens
tagttgtacgtttaa

SEQ ID NO: 162329 - DNA, 15 bp, Homo sapiens
agttgtacgtttaaa

SEQ ID NO: 162330 - DNA, 15 bp, Homo sapiens
gttgtacgtttaaaa

SEQ ID NO: 162331 - DNA, 15 bp, Homo sapiens
ttgtacgtttaaaag

SEQ ID NO: 162332 - DNA, 15 bp, Homo sapiens
tgtacgtttaaaagt

SEQ ID NO: 162333 - DNA, 15 bp, Homo sapiens
gtacgtttaaaagtg

SEQ ID NO: 162334 - DNA, 15 bp, Homo sapiens
tacgtttaaaagtgt

SEQ ID NO: 162335 - DNA, 15 bp, Homo sapiens
acgtttaaaagtgta

SEQ ID NO: 162336 - DNA, 15 bp, Homo sapiens
cgtttaaaagtgtag

SEQ ID NO: 162337 - DNA, 15 bp, Homo sapiens
gtttaaaagtgtagg

SEQ ID NO: 162338 - DNA, 15 bp, Homo sapiens
tttaaaagtgtaggt

SEQ ID NO: 162339 - DNA, 15 bp, Homo sapiens
ttaaaagtgtaggtc

SEQ ID NO: 162340 - DNA, 15 bp, Homo sapiens
taaaagtgtaggtca

SEQ ID NO: 162341 - DNA, 15 bp, Homo sapiens
aaaagtgtaggtcaa

SEQ ID NO: 162342 - DNA, 15 bp, Homo sapiens
aaagtgtaggtcaaa

SEQ ID NO: 162343 - DNA, 15 bp, Homo sapiens
aagtgtaggtcaaaa

SEQ ID NO: 162344 - DNA, 15 bp, Homo sapiens
agtgtaggtcaaaaa

SEQ ID NO: 162345 - DNA, 15 bp, Homo sapiens
gtgtaggtcaaaaac

SEQ ID NO: 162346 - DNA, 15 bp, Homo sapiens
tgtaggtcaaaaaca

SEQ ID NO: 162347 - DNA, 15 bp, Homo sapiens
gtaggtcaaaaacaa

SEQ ID NO: 162348 - DNA, 15 bp, Homo sapiens
taggtcaaaaacaaa

SEQ ID NO: 162349 - DNA, 15 bp, Homo sapiens
aggtcaaaaacaaat

SEQ ID NO: 162350 - DNA, 15 bp, Homo sapiens
ggtcaaaaacaaatc

SEQ ID NO: 162351 - DNA, 15 bp, Homo sapiens
gtcaaaaacaaatcc

SEQ ID NO: 162352 - DNA, 15 bp, Homo sapiens
tcaaaaacaaatcca

SEQ ID NO: 162353 - DNA, 15 bp, Homo sapiens
caaaaacaaatccag

SEQ ID NO: 162354 - DNA, 15 bp, Homo sapiens
aaaaacaaatccaga

SEQ ID NO: 162355 - DNA, 15 bp, Homo sapiens
aaaacaaatccagag

SEQ ID NO: 162356 - DNA, 15 bp, Homo sapiens
aaacaaatccagagg

SEQ ID NO: 162357 - DNA, 15 bp, Homo sapiens
aacaaatccagaggc

SEQ ID NO: 162358 - DNA, 15 bp, Homo sapiens
acaaatccagaggcc

SEQ ID NO: 162359 - DNA, 15 bp, Homo sapiens
caaatccagaggcca

SEQ ID NO: 162360 - DNA, 15 bp, Homo sapiens
aaatccagaggccag

SEQ ID NO: 162361 - DNA, 15 bp, Homo sapiens
aatccagaggccagg

SEQ ID NO: 162362 - DNA, 15 bp, Homo sapiens
atccagaggccagga

SEQ ID NO: 162363 - DNA, 15 bp, Homo sapiens
tccagaggccaggag

SEQ ID NO: 162364 - DNA, 15 bp, Homo sapiens
ccagaggccaggagc

SEQ ID NO: 162365 - DNA, 15 bp, Homo sapiens
cagaggccaggagct

SEQ ID NO: 162366 - DNA, 15 bp, Homo sapiens
agaggccaggagctg

SEQ ID NO: 162367 - DNA, 15 bp, Homo sapiens
gaggccaggagctgt

SEQ ID NO: 162368 - DNA, 15 bp, Homo sapiens
aggccaggagctgtg

SEQ ID NO: 162369 - DNA, 15 bp, Homo sapiens
ggccaggagctgtgg

SEQ ID NO: 162370 - DNA, 15 bp, Homo sapiens
gccaggagctgtggc

SEQ ID NO: 162371 - DNA, 15 bp, Homo sapiens
ccaggagctgtggct

SEQ ID NO: 162372 - DNA, 15 bp, Homo sapiens
caggagctgtggctc

SEQ ID NO: 162373 - DNA, 15 bp, Homo sapiens
aggagctgtggctca

SEQ ID NO: 162374 - DNA, 15 bp, Homo sapiens
ggagctgtggctcat

SEQ ID NO: 162375 - DNA, 15 bp, Homo sapiens
gagctgtggctcatg

SEQ ID NO: 162376 - DNA, 15 bp, Homo sapiens
agctgtggctcatgc

SEQ ID NO: 162377 - DNA, 15 bp, Homo sapiens
gctgtggctcatgcc

SEQ ID NO: 162378 - DNA, 15 bp, Homo sapiens
ctgtggctcatgcct

SEQ ID NO: 162379 - DNA, 15 bp, Homo sapiens
tgtggctcatgcctg

SEQ ID NO: 162380 - DNA, 15 bp, Homo sapiens
catgcctgtaatcct

SEQ ID NO: 162381 - DNA, 15 bp, Homo sapiens
atgcctgtaatccta

SEQ ID NO: 162382 - DNA, 15 bp, Homo sapiens
cactttgggaggccg

SEQ ID NO: 162383 - DNA, 15 bp, Homo sapiens
actttgggaggccga

SEQ ID NO: 162384 - DNA, 15 bp, Homo sapiens
ctttgggaggccgaa

SEQ ID NO: 162385 - DNA, 15 bp, Homo sapiens
tttgggaggccgaag

SEQ ID NO: 162386 - DNA, 15 bp, Homo sapiens
ttgggaggccgaagc

SEQ ID NO: 162387 - DNA, 15 bp, Homo sapiens
tgggaggccgaagcg

SEQ ID NO: 162388 - DNA, 15 bp, Homo sapiens
gggaggccgaagcgg

SEQ ID NO: 162389 - DNA, 15 bp, Homo sapiens
ggaggccgaagcggg

SEQ ID NO: 162390 - DNA, 15 bp, Homo sapiens
gaggccgaagcgggt

SEQ ID NO: 162391 - DNA, 15 bp, Homo sapiens
aggccgaagcgggtg

SEQ ID NO: 162392 - DNA, 15 bp, Homo sapiens
ggccgaagcgggtgg

SEQ ID NO: 162393 - DNA, 15 bp, Homo sapiens
gccgaagcgggtgga

SEQ ID NO: 162394 - DNA, 15 bp, Homo sapiens
ccgaagcgggtggat

SEQ ID NO: 162395 - DNA, 15 bp, Homo sapiens
cgaagcgggtggatc

SEQ ID NO: 162396 - DNA, 15 bp, Homo sapiens
gaagcgggtggatca

SEQ ID NO: 162397 - DNA, 15 bp, Homo sapiens
aagcgggtggatcac

SEQ ID NO: 162398 - DNA, 15 bp, Homo sapiens
agcgggtggatcact

SEQ ID NO: 162399 - DNA, 15 bp, Homo sapiens
agaccagcctggcct

SEQ ID NO: 162400 - DNA, 15 bp, Homo sapiens
gaccagcctggccta

SEQ ID NO: 162401 - DNA, 15 bp, Homo sapiens
accagcctggcctac

SEQ ID NO: 162402 - DNA, 15 bp, Homo sapiens
ccagcctggcctaca

SEQ ID NO: 162403 - DNA, 15 bp, Homo sapiens
cagcctggcctacat

SEQ ID NO: 162404 - DNA, 15 bp, Homo sapiens
agcctggcctacatg

SEQ ID NO: 162405 - DNA, 15 bp, Homo sapiens
gcctggcctacatga

SEQ ID NO: 162406 - DNA, 15 bp, Homo sapiens
cctggcctacatgac

SEQ ID NO: 162407 - DNA, 15 bp, Homo sapiens
ctggcctacatgaca

SEQ ID NO: 162408 - DNA, 15 bp, Homo sapiens
tggcctacatgacaa

SEQ ID NO: 162409 - DNA, 15 bp, Homo sapiens
ggcctacatgacaaa

SEQ ID NO: 162410 - DNA, 15 bp, Homo sapiens
gcctacatgacaaaa

SEQ ID NO: 162411 - DNA, 15 bp, Homo sapiens
cctacatgacaaaac

SEQ ID NO: 162412 - DNA, 15 bp, Homo sapiens
ctacatgacaaaacc

SEQ ID NO: 162413 - DNA, 15 bp, Homo sapiens
tacatgacaaaaccc

SEQ ID NO: 162414 - DNA, 15 bp, Homo sapiens
acatgacaaaacccc

SEQ ID NO: 162415 - DNA, 15 bp, Homo sapiens
catgacaaaaccccg

SEQ ID NO: 162416 - DNA, 15 bp, Homo sapiens
atgacaaaaccccgt

SEQ ID NO: 162417 - DNA, 15 bp, Homo sapiens
tgacaaaaccccgta

SEQ ID NO: 162418 - DNA, 15 bp, Homo sapiens
gacaaaaccccgtat

SEQ ID NO: 162419 - DNA, 15 bp, Homo sapiens
acaaaaccccgtatc

SEQ ID NO: 162420 - DNA, 15 bp, Homo sapiens
caaaaccccgtatct

SEQ ID NO: 162421 - DNA, 15 bp, Homo sapiens
aaaaccccgtatcta

SEQ ID NO: 162422 - DNA, 15 bp, Homo sapiens
aaaccccgtatctac

SEQ ID NO: 162423 - DNA, 15 bp, Homo sapiens
aaccccgtatctact

SEQ ID NO: 162424 - DNA, 15 bp, Homo sapiens
accccgtatctacta

SEQ ID NO: 162425 - DNA, 15 bp, Homo sapiens
ccccgtatctactaa

SEQ ID NO: 162426 - DNA, 15 bp, Homo sapiens
cccgtatctactaaa

SEQ ID NO: 162427 - DNA, 15 bp, Homo sapiens
ccgtatctactaaaa

SEQ ID NO: 162428 - DNA, 15 bp, Homo sapiens
cgtatctactaaaaa

SEQ ID NO: 162429 - DNA, 15 bp, Homo sapiens
gtatctactaaaaat

SEQ ID NO: 162430 - DNA, 15 bp, Homo sapiens
tatctactaaaaata

SEQ ID NO: 162431 - DNA, 15 bp, Homo sapiens
atctactaaaaatac

SEQ ID NO: 162432 - DNA, 15 bp, Homo sapiens
aaaaatacaaaaaaa

SEQ ID NO: 162433 - DNA, 15 bp, Homo sapiens
tacaaaaaaattagc

SEQ ID NO: 162434 - DNA, 15 bp, Homo sapiens
acaaaaaaattagct

SEQ ID NO: 162435 - DNA, 15 bp, Homo sapiens
caaaaaaattagctg

SEQ ID NO: 162436 - DNA, 15 bp, Homo sapiens
aaaaaattagctggg

SEQ ID NO: 162437 - DNA, 15 bp, Homo sapiens
aaattagctgggctt

SEQ ID NO: 162438 - DNA, 15 bp, Homo sapiens
aattagctgggcttg

SEQ ID NO: 162439 - DNA, 15 bp, Homo sapiens
attagctgggcttgg

SEQ ID NO: 162440 - DNA, 15 bp, Homo sapiens
gctgggcttggtggc

SEQ ID NO: 162441 - DNA, 15 bp, Homo sapiens
ctgggcttggtggca

SEQ ID NO: 162442 - DNA, 15 bp, Homo sapiens
tgggcttggtggcac

SEQ ID NO: 162443 - DNA, 15 bp, Homo sapiens
gggcttggtggcaca

SEQ ID NO: 162444 - DNA, 15 bp, Homo sapiens
ggcttggtggcacac

SEQ ID NO: 162445 - DNA, 15 bp, Homo sapiens
gcttggtggcacaca

SEQ ID NO: 162446 - DNA, 15 bp, Homo sapiens
cttggtggcacacac

SEQ ID NO: 162447 - DNA, 15 bp, Homo sapiens
ttggtggcacacacc

SEQ ID NO: 162448 - DNA, 15 bp, Homo sapiens
tggtggcacacacct

SEQ ID NO: 162449 - DNA, 15 bp, Homo sapiens
ggtggcacacacctg

SEQ ID NO: 162450 - DNA, 15 bp, Homo sapiens
gtggcacacacctgt

SEQ ID NO: 162451 - DNA, 15 bp, Homo sapiens
tggcacacacctgta

SEQ ID NO: 162452 - DNA, 15 bp, Homo sapiens
ggcacacacctgtaa

SEQ ID NO: 162453 - DNA, 15 bp, Homo sapiens
gcacacacctgtaat

SEQ ID NO: 162454 - DNA, 15 bp, Homo sapiens
cacacacctgtaatc

SEQ ID NO: 162455 - DNA, 15 bp, Homo sapiens
acacacctgtaatcc

SEQ ID NO: 162456 - DNA, 15 bp, Homo sapiens
aattgcttgaaccct

SEQ ID NO: 162457 - DNA, 15 bp, Homo sapiens
attgcttgaaccctg

SEQ ID NO: 162458 - DNA, 15 bp, Homo sapiens
ttgcttgaaccctgt

SEQ ID NO: 162459 - DNA, 15 bp, Homo sapiens
tgcttgaaccctgta

SEQ ID NO: 162460 - DNA, 15 bp, Homo sapiens
gcttgaaccctgtag

SEQ ID NO: 162461 - DNA, 15 bp, Homo sapiens
cttgaaccctgtagg

SEQ ID NO: 162462 - DNA, 15 bp, Homo sapiens
ttgaaccctgtagga

SEQ ID NO: 162463 - DNA, 15 bp, Homo sapiens
tgaaccctgtaggaa

SEQ ID NO: 162464 - DNA, 15 bp, Homo sapiens
gaaccctgtaggaag

SEQ ID NO: 162465 - DNA, 15 bp, Homo sapiens
aaccctgtaggaaga

SEQ ID NO: 162466 - DNA, 15 bp, Homo sapiens
accctgtaggaagag

SEQ ID NO: 162467 - DNA, 15 bp, Homo sapiens
ccctgtaggaagagg

SEQ ID NO: 162468 - DNA, 15 bp, Homo sapiens
cctgtaggaagaggt

SEQ ID NO: 162469 - DNA, 15 bp, Homo sapiens
ctgtaggaagaggtt

SEQ ID NO: 162470 - DNA, 15 bp, Homo sapiens
tgtaggaagaggttg

SEQ ID NO: 162471 - DNA, 15 bp, Homo sapiens
gtaggaagaggttgt

SEQ ID NO: 162472 - DNA, 15 bp, Homo sapiens
taggaagaggttgta

SEQ ID NO: 162473 - DNA, 15 bp, Homo sapiens
aggaagaggttgtag

SEQ ID NO: 162474 - DNA, 15 bp, Homo sapiens
ggaagaggttgtagt

SEQ ID NO: 162475 - DNA, 15 bp, Homo sapiens
gaagaggttgtagtg

SEQ ID NO: 162476 - DNA, 15 bp, Homo sapiens
aagaggttgtagtga

SEQ ID NO: 162477 - DNA, 15 bp, Homo sapiens
aggttgtagtgagcc

SEQ ID NO: 162478 - DNA, 15 bp, Homo sapiens
ggttgtagtgagcca

SEQ ID NO: 162479 - DNA, 15 bp, Homo sapiens
gttgtagtgagccaa

SEQ ID NO: 162480 - DNA, 15 bp, Homo sapiens
ttgtagtgagccaag

SEQ ID NO: 162481 - DNA, 15 bp, Homo sapiens
tgtagtgagccaaga

SEQ ID NO: 162482 - DNA, 15 bp, Homo sapiens
gtagtgagccaagat

SEQ ID NO: 162483 - DNA, 15 bp, Homo sapiens
tagtgagccaagatc

SEQ ID NO: 162484 - DNA, 15 bp, Homo sapiens
tgagccaagatcgca

SEQ ID NO: 162485 - DNA, 15 bp, Homo sapiens
gagccaagatcgcac

SEQ ID NO: 162486 - DNA, 15 bp, Homo sapiens
agccaagatcgcacc

SEQ ID NO: 162487 - DNA, 15 bp, Homo sapiens
gccaagatcgcaccg

SEQ ID NO: 162488 - DNA, 15 bp, Homo sapiens
ccaagatcgcaccgt

SEQ ID NO: 162489 - DNA, 15 bp, Homo sapiens
caagatcgcaccgtt

SEQ ID NO: 162490 - DNA, 15 bp, Homo sapiens
aagatcgcaccgttg

SEQ ID NO: 162491 - DNA, 15 bp, Homo sapiens
agatcgcaccgttgc

SEQ ID NO: 162492 - DNA, 15 bp, Homo sapiens
gatcgcaccgttgca

SEQ ID NO: 162493 - DNA, 15 bp, Homo sapiens
atcgcaccgttgcac

SEQ ID NO: 162494 - DNA, 15 bp, Homo sapiens
tcgcaccgttgcact

SEQ ID NO: 162495 - DNA, 15 bp, Homo sapiens
cgcaccgttgcactc

SEQ ID NO: 162496 - DNA, 15 bp, Homo sapiens
gcaccgttgcactcc

SEQ ID NO: 162497 - DNA, 15 bp, Homo sapiens
caccgttgcactcca

SEQ ID NO: 162498 - DNA, 15 bp, Homo sapiens
accgttgcactccag

SEQ ID NO: 162499 - DNA, 15 bp, Homo sapiens
ccgttgcactccagc

SEQ ID NO: 162500 - DNA, 15 bp, Homo sapiens
cgttgcactccagcc

SEQ ID NO: 162501 - DNA, 15 bp, Homo sapiens
gttgcactccagcct

SEQ ID NO: 162502 - DNA, 15 bp, Homo sapiens
tgggcaacaagagca

SEQ ID NO: 162503 - DNA, 15 bp, Homo sapiens
gggcaacaagagcaa

SEQ ID NO: 162504 - DNA, 15 bp, Homo sapiens
ggcaacaagagcaaa

SEQ ID NO: 162505 - DNA, 15 bp, Homo sapiens
gcaacaagagcaaaa

SEQ ID NO: 162506 - DNA, 15 bp, Homo sapiens
caacaagagcaaaac

SEQ ID NO: 162507 - DNA, 15 bp, Homo sapiens
aacaagagcaaaact

SEQ ID NO: 162508 - DNA, 15 bp, Homo sapiens
acaagagcaaaactc

SEQ ID NO: 162509 - DNA, 15 bp, Homo sapiens
caagagcaaaactcc

SEQ ID NO: 162510 - DNA, 15 bp, Homo sapiens
agagcaaaactccat

SEQ ID NO: 162511 - DNA, 15 bp, Homo sapiens
gagcaaaactccatc

SEQ ID NO: 162512 - DNA, 15 bp, Homo sapiens
agcaaaactccatct

SEQ ID NO: 162513 - DNA, 15 bp, Homo sapiens
gcaaaactccatctc

SEQ ID NO: 162514 - DNA, 15 bp, Homo sapiens
caaaactccatctca

SEQ ID NO: 162515 - DNA, 15 bp, Homo sapiens
tccatctcaaaaaac

SEQ ID NO: 162516 - DNA, 15 bp, Homo sapiens
ccatctcaaaaaaca

SEQ ID NO: 162517 - DNA, 15 bp, Homo sapiens
catctcaaaaaacaa

SEQ ID NO: 162518 - DNA, 15 bp, Homo sapiens
atctcaaaaaacaaa

SEQ ID NO: 162519 - DNA, 15 bp, Homo sapiens
tctcaaaaaacaaat

SEQ ID NO: 162520 - DNA, 15 bp, Homo sapiens
ctcaaaaaacaaatt

SEQ ID NO: 162521 - DNA, 15 bp, Homo sapiens
tcaaaaaacaaatta

SEQ ID NO: 162522 - DNA, 15 bp, Homo sapiens
caaaaaacaaattaa

SEQ ID NO: 162523 - DNA, 15 bp, Homo sapiens
aaaaaacaaattaaa

SEQ ID NO: 162524 - DNA, 15 bp, Homo sapiens
aaaaacaaattaaat

SEQ ID NO: 162525 - DNA, 15 bp, Homo sapiens
aaaacaaattaaatc

SEQ ID NO: 162526 - DNA, 15 bp, Homo sapiens
aaacaaattaaatcc

SEQ ID NO: 162527 - DNA, 15 bp, Homo sapiens
aacaaattaaatcca

SEQ ID NO: 162528 - DNA, 15 bp, Homo sapiens
acaaattaaatccag

SEQ ID NO: 162529 - DNA, 15 bp, Homo sapiens
caaattaaatccaga

SEQ ID NO: 162530 - DNA, 15 bp, Homo sapiens
aaattaaatccagag

SEQ ID NO: 162531 - DNA, 15 bp, Homo sapiens
aattaaatccagaga

SEQ ID NO: 162532 - DNA, 15 bp, Homo sapiens
attaaatccagagat

SEQ ID NO: 162533 - DNA, 15 bp, Homo sapiens
ttaaatccagagatt

SEQ ID NO: 162534 - DNA, 15 bp, Homo sapiens
taaatccagagattt

SEQ ID NO: 162535 - DNA, 15 bp, Homo sapiens
aaatccagagattta

SEQ ID NO: 162536 - DNA, 15 bp, Homo sapiens
aatccagagatttaa

SEQ ID NO: 162537 - DNA, 15 bp, Homo sapiens
atccagagatttaaa

SEQ ID NO: 162538 - DNA, 15 bp, Homo sapiens
tccagagatttaaaa

SEQ ID NO: 162539 - DNA, 15 bp, Homo sapiens
ccagagatttaaaag

SEQ ID NO: 162540 - DNA, 15 bp, Homo sapiens
cagagatttaaaagc

SEQ ID NO: 162541 - DNA, 15 bp, Homo sapiens
agagatttaaaagct

SEQ ID NO: 162542 - DNA, 15 bp, Homo sapiens
gagatttaaaagctc

SEQ ID NO: 162543 - DNA, 15 bp, Homo sapiens
agatttaaaagctct

SEQ ID NO: 162544 - DNA, 15 bp, Homo sapiens
gatttaaaagctctc

SEQ ID NO: 162545 - DNA, 15 bp, Homo sapiens
atttaaaagctctca

SEQ ID NO: 162546 - DNA, 15 bp, Homo sapiens
tttaaaagctctcag

SEQ ID NO: 162547 - DNA, 15 bp, Homo sapiens
ttaaaagctctcaga

SEQ ID NO: 162548 - DNA, 15 bp, Homo sapiens
taaaagctctcagag

SEQ ID NO: 162549 - DNA, 15 bp, Homo sapiens
aaaagctctcagagg

SEQ ID NO: 162550 - DNA, 15 bp, Homo sapiens
aaagctctcagaggc

SEQ ID NO: 162551 - DNA, 15 bp, Homo sapiens
aagctctcagaggct

SEQ ID NO: 162552 - DNA, 15 bp, Homo sapiens
agctctcagaggctg

SEQ ID NO: 162553 - DNA, 15 bp, Homo sapiens
gctctcagaggctgg

SEQ ID NO: 162554 - DNA, 15 bp, Homo sapiens
ctctcagaggctggg

SEQ ID NO: 162555 - DNA, 15 bp, Homo sapiens
tctcagaggctgggc

SEQ ID NO: 162556 - DNA, 15 bp, Homo sapiens
ctcagaggctgggcg

SEQ ID NO: 162557 - DNA, 15 bp, Homo sapiens
tcagaggctgggcgc

SEQ ID NO: 162558 - DNA, 15 bp, Homo sapiens
cagaggctgggcgcg

SEQ ID NO: 162559 - DNA, 15 bp, Homo sapiens
agaggctgggcgcgg

SEQ ID NO: 162560 - DNA, 15 bp, Homo sapiens
gaggctgggcgcggt

SEQ ID NO: 162561 - DNA, 15 bp, Homo sapiens
aggctgggcgcggtg

SEQ ID NO: 162562 - DNA, 15 bp, Homo sapiens
tgggcgcggtggctt

SEQ ID NO: 162563 - DNA, 15 bp, Homo sapiens
gggcgcggtggctta

SEQ ID NO: 162564 - DNA, 15 bp, Homo sapiens
ggcgcggtggcttac

SEQ ID NO: 162565 - DNA, 15 bp, Homo sapiens
gcgcggtggcttaca

SEQ ID NO: 162566 - DNA, 15 bp, Homo sapiens
cgcggtggcttacac

SEQ ID NO: 162567 - DNA, 15 bp, Homo sapiens
gcggtggcttacacc

SEQ ID NO: 162568 - DNA, 15 bp, Homo sapiens
cggtggcttacacct

SEQ ID NO: 162569 - DNA, 15 bp, Homo sapiens
ggtggcttacacctg

SEQ ID NO: 162570 - DNA, 15 bp, Homo sapiens
gtggcttacacctgt

SEQ ID NO: 162571 - DNA, 15 bp, Homo sapiens
tggcttacacctgtt

SEQ ID NO: 162572 - DNA, 15 bp, Homo sapiens
ggcttacacctgtta

SEQ ID NO: 162573 - DNA, 15 bp, Homo sapiens
gcttacacctgttat

SEQ ID NO: 162574 - DNA, 15 bp, Homo sapiens
cttacacctgttatc

SEQ ID NO: 162575 - DNA, 15 bp, Homo sapiens
ttacacctgttatcc

SEQ ID NO: 162576 - DNA, 15 bp, Homo sapiens
tacacctgttatccc

SEQ ID NO: 162577 - DNA, 15 bp, Homo sapiens
acacctgttatccca

SEQ ID NO: 162578 - DNA, 15 bp, Homo sapiens
cacctgttatcccag

SEQ ID NO: 162579 - DNA, 15 bp, Homo sapiens
acctgttatcccagc

SEQ ID NO: 162580 - DNA, 15 bp, Homo sapiens
cctgttatcccagca

SEQ ID NO: 162581 - DNA, 15 bp, Homo sapiens
ctgttatcccagcat

SEQ ID NO: 162582 - DNA, 15 bp, Homo sapiens
tgttatcccagcatt

SEQ ID NO: 162583 - DNA, 15 bp, Homo sapiens
gttatcccagcattt

SEQ ID NO: 162584 - DNA, 15 bp, Homo sapiens
ttatcccagcatttt

SEQ ID NO: 162585 - DNA, 15 bp, Homo sapiens
tatcccagcattttg

SEQ ID NO: 162586 - DNA, 15 bp, Homo sapiens
atcccagcattttgg

SEQ ID NO: 162587 - DNA, 15 bp, Homo sapiens
tcccagcattttggg

SEQ ID NO: 162588 - DNA, 15 bp, Homo sapiens
cccagcattttggga

SEQ ID NO: 162589 - DNA, 15 bp, Homo sapiens
ccagcattttgggat

SEQ ID NO: 162590 - DNA, 15 bp, Homo sapiens
cagcattttgggatg

SEQ ID NO: 162591 - DNA, 15 bp, Homo sapiens
agcattttgggatgc

SEQ ID NO: 162592 - DNA, 15 bp, Homo sapiens
gcattttgggatgcc

SEQ ID NO: 162593 - DNA, 15 bp, Homo sapiens
cattttgggatgccg

SEQ ID NO: 162594 - DNA, 15 bp, Homo sapiens
ttgggatgccgaggc

SEQ ID NO: 162595 - DNA, 15 bp, Homo sapiens
tgggatgccgaggcg

SEQ ID NO: 162596 - DNA, 15 bp, Homo sapiens
gggatgccgaggcgg

SEQ ID NO: 162597 - DNA, 15 bp, Homo sapiens
ggatgccgaggcggg

SEQ ID NO: 162598 - DNA, 15 bp, Homo sapiens
gatgccgaggcgggc

SEQ ID NO: 162599 - DNA, 15 bp, Homo sapiens
atgccgaggcgggca

SEQ ID NO: 162600 - DNA, 15 bp, Homo sapiens
tgccgaggcgggcaa

SEQ ID NO: 162601 - DNA, 15 bp, Homo sapiens
gccgaggcgggcaaa

SEQ ID NO: 162602 - DNA, 15 bp, Homo sapiens
ccgaggcgggcaaag

SEQ ID NO: 162603 - DNA, 15 bp, Homo sapiens
cgaggcgggcaaagc

SEQ ID NO: 162604 - DNA, 15 bp, Homo sapiens
gaggcgggcaaagca

SEQ ID NO: 162605 - DNA, 15 bp, Homo sapiens
aggcgggcaaagcac

SEQ ID NO: 162606 - DNA, 15 bp, Homo sapiens
ggcgggcaaagcaca

SEQ ID NO: 162607 - DNA, 15 bp, Homo sapiens
gcgggcaaagcacaa

SEQ ID NO: 162608 - DNA, 15 bp, Homo sapiens
cgggcaaagcacaag

SEQ ID NO: 162609 - DNA, 15 bp, Homo sapiens
gggcaaagcacaagg

SEQ ID NO: 162610 - DNA, 15 bp, Homo sapiens
ggcaaagcacaaggt

SEQ ID NO: 162611 - DNA, 15 bp, Homo sapiens
gcaaagcacaaggtc

SEQ ID NO: 162612 - DNA, 15 bp, Homo sapiens
caaagcacaaggtca

SEQ ID NO: 162613 - DNA, 15 bp, Homo sapiens
aaagcacaaggtcag

SEQ ID NO: 162614 - DNA, 15 bp, Homo sapiens
aagcacaaggtcagg

SEQ ID NO: 162615 - DNA, 15 bp, Homo sapiens
agcacaaggtcagga

SEQ ID NO: 162616 - DNA, 15 bp, Homo sapiens
gcacaaggtcaggag

SEQ ID NO: 162617 - DNA, 15 bp, Homo sapiens
agcctggccaacata

SEQ ID NO: 162618 - DNA, 15 bp, Homo sapiens
gcctggccaacatag

SEQ ID NO: 162619 - DNA, 15 bp, Homo sapiens
catagtgaaaccctg

SEQ ID NO: 162620 - DNA, 15 bp, Homo sapiens
atagtgaaaccctgt

SEQ ID NO: 162621 - DNA, 15 bp, Homo sapiens
tagtgaaaccctgtc

SEQ ID NO: 162622 - DNA, 15 bp, Homo sapiens
agtgaaaccctgtct

SEQ ID NO: 162623 - DNA, 15 bp, Homo sapiens
gaaaccctgtctctg

SEQ ID NO: 162624 - DNA, 15 bp, Homo sapiens
aaaccctgtctctgc

SEQ ID NO: 162625 - DNA, 15 bp, Homo sapiens
aaccctgtctctgct

SEQ ID NO: 162626 - DNA, 15 bp, Homo sapiens
accctgtctctgcta

SEQ ID NO: 162627 - DNA, 15 bp, Homo sapiens
ccctgtctctgctaa

SEQ ID NO: 162628 - DNA, 15 bp, Homo sapiens
cctgtctctgctaaa

SEQ ID NO: 162629 - DNA, 15 bp, Homo sapiens
ctgtctctgctaaaa

SEQ ID NO: 162630 - DNA, 15 bp, Homo sapiens
tgtctctgctaaaaa

SEQ ID NO: 162631 - DNA, 15 bp, Homo sapiens
gtctctgctaaaaac

SEQ ID NO: 162632 - DNA, 15 bp, Homo sapiens
tctctgctaaaaaca

SEQ ID NO: 162633 - DNA, 15 bp, Homo sapiens
ctctgctaaaaacat

SEQ ID NO: 162634 - DNA, 15 bp, Homo sapiens
tctgctaaaaacata

SEQ ID NO: 162635 - DNA, 15 bp, Homo sapiens
ctgctaaaaacatag

SEQ ID NO: 162636 - DNA, 15 bp, Homo sapiens
tgctaaaaacataga

SEQ ID NO: 162637 - DNA, 15 bp, Homo sapiens
gctaaaaacatagaa

SEQ ID NO: 162638 - DNA, 15 bp, Homo sapiens
ctaaaaacatagaaa

SEQ ID NO: 162639 - DNA, 15 bp, Homo sapiens
taaaaacatagaaaa

SEQ ID NO: 162640 - DNA, 15 bp, Homo sapiens
aaaaacatagaaaaa

SEQ ID NO: 162641 - DNA, 15 bp, Homo sapiens
aaaacatagaaaaat

SEQ ID NO: 162642 - DNA, 15 bp, Homo sapiens
aaacatagaaaaatt

SEQ ID NO: 162643 - DNA, 15 bp, Homo sapiens
aacatagaaaaatta

SEQ ID NO: 162644 - DNA, 15 bp, Homo sapiens
acatagaaaaattag

SEQ ID NO: 162645 - DNA, 15 bp, Homo sapiens
catagaaaaattagc

SEQ ID NO: 162646 - DNA, 15 bp, Homo sapiens
atagaaaaattagcc

SEQ ID NO: 162647 - DNA, 15 bp, Homo sapiens
tagaaaaattagccg

SEQ ID NO: 162648 - DNA, 15 bp, Homo sapiens
agaaaaattagccgg

SEQ ID NO: 162649 - DNA, 15 bp, Homo sapiens
gaaaaattagccggg

SEQ ID NO: 162650 - DNA, 15 bp, Homo sapiens
ccgggcatggtggcg

SEQ ID NO: 162651 - DNA, 15 bp, Homo sapiens
cgggcatggtggcgt

SEQ ID NO: 162652 - DNA, 15 bp, Homo sapiens
gggcatggtggcgtg

SEQ ID NO: 162653 - DNA, 15 bp, Homo sapiens
ggtggcgtgcgcctg

SEQ ID NO: 162654 - DNA, 15 bp, Homo sapiens
gtggcgtgcgcctgt

SEQ ID NO: 162655 - DNA, 15 bp, Homo sapiens
tggcgtgcgcctgta

SEQ ID NO: 162656 - DNA, 15 bp, Homo sapiens
ggcgtgcgcctgtaa

SEQ ID NO: 162657 - DNA, 15 bp, Homo sapiens
gcgtgcgcctgtaat

SEQ ID NO: 162658 - DNA, 15 bp, Homo sapiens
cgtgcgcctgtaatc

SEQ ID NO: 162659 - DNA, 15 bp, Homo sapiens
gtgcgcctgtaatcc

SEQ ID NO: 162660 - DNA, 15 bp, Homo sapiens
tgcgcctgtaatccc

SEQ ID NO: 162661 - DNA, 15 bp, Homo sapiens
tcgggaggctgaggt

SEQ ID NO: 162662 - DNA, 15 bp, Homo sapiens
cgggaggctgaggtg

SEQ ID NO: 162663 - DNA, 15 bp, Homo sapiens
gggaggctgaggtga

SEQ ID NO: 162664 - DNA, 15 bp, Homo sapiens
ggaggctgaggtgag

SEQ ID NO: 162665 - DNA, 15 bp, Homo sapiens
gaggctgaggtgaga

SEQ ID NO: 162666 - DNA, 15 bp, Homo sapiens
aggctgaggtgagag

SEQ ID NO: 162667 - DNA, 15 bp, Homo sapiens
ggctgaggtgagaga

SEQ ID NO: 162668 - DNA, 15 bp, Homo sapiens
gctgaggtgagagaa

SEQ ID NO: 162669 - DNA, 15 bp, Homo sapiens
ctgaggtgagagaat

SEQ ID NO: 162670 - DNA, 15 bp, Homo sapiens
tgaggtgagagaatt

SEQ ID NO: 162671 - DNA, 15 bp, Homo sapiens
gaggtgagagaatta

SEQ ID NO: 162672 - DNA, 15 bp, Homo sapiens
aggtgagagaattac

SEQ ID NO: 162673 - DNA, 15 bp, Homo sapiens
ggtgagagaattact

SEQ ID NO: 162674 - DNA, 15 bp, Homo sapiens
gtgagagaattactt

SEQ ID NO: 162675 - DNA, 15 bp, Homo sapiens
tgagagaattacttg

SEQ ID NO: 162676 - DNA, 15 bp, Homo sapiens
gagagaattacttga

SEQ ID NO: 162677 - DNA, 15 bp, Homo sapiens
agagaattacttgaa

SEQ ID NO: 162678 - DNA, 15 bp, Homo sapiens
gagaattacttgaac

SEQ ID NO: 162679 - DNA, 15 bp, Homo sapiens
agaattacttgaacc

SEQ ID NO: 162680 - DNA, 15 bp, Homo sapiens
gaattacttgaaccc

SEQ ID NO: 162681 - DNA, 15 bp, Homo sapiens
aattacttgaacccg

SEQ ID NO: 162682 - DNA, 15 bp, Homo sapiens
attacttgaacccgg

SEQ ID NO: 162683 - DNA, 15 bp, Homo sapiens
ttacttgaacccggg

SEQ ID NO: 162684 - DNA, 15 bp, Homo sapiens
tacttgaacccggga

SEQ ID NO: 162685 - DNA, 15 bp, Homo sapiens
acttgaacccgggag

SEQ ID NO: 162686 - DNA, 15 bp, Homo sapiens
ggttgcagtgagccc

SEQ ID NO: 162687 - DNA, 15 bp, Homo sapiens
cagtgagcccagatt

SEQ ID NO: 162688 - DNA, 15 bp, Homo sapiens
agtgagcccagattg

SEQ ID NO: 162689 - DNA, 15 bp, Homo sapiens
gtgagcccagattgc

SEQ ID NO: 162690 - DNA, 15 bp, Homo sapiens
tgagcccagattgca

SEQ ID NO: 162691 - DNA, 15 bp, Homo sapiens
gagcccagattgcac

SEQ ID NO: 162692 - DNA, 15 bp, Homo sapiens
agcccagattgcacc

SEQ ID NO: 162693 - DNA, 15 bp, Homo sapiens
gcccagattgcacca

SEQ ID NO: 162694 - DNA, 15 bp, Homo sapiens
cccagattgcaccac

SEQ ID NO: 162695 - DNA, 15 bp, Homo sapiens
ccagattgcaccact

SEQ ID NO: 162696 - DNA, 15 bp, Homo sapiens
cagattgcaccactg

SEQ ID NO: 162697 - DNA, 15 bp, Homo sapiens
agattgcaccactgc

SEQ ID NO: 162698 - DNA, 15 bp, Homo sapiens
gattgcaccactgca

SEQ ID NO: 162699 - DNA, 15 bp, Homo sapiens
attgcaccactgcac

SEQ ID NO: 162700 - DNA, 15 bp, Homo sapiens
ttgcaccactgcact

SEQ ID NO: 162701 - DNA, 15 bp, Homo sapiens
tgcaccactgcactc

SEQ ID NO: 162702 - DNA, 15 bp, Homo sapiens
accactgcactccag

SEQ ID NO: 162703 - DNA, 15 bp, Homo sapiens
ccagctgtaagcttc

SEQ ID NO: 162704 - DNA, 15 bp, Homo sapiens
cagctgtaagcttca

SEQ ID NO: 162705 - DNA, 15 bp, Homo sapiens
agctgtaagcttcag

SEQ ID NO: 162706 - DNA, 15 bp, Homo sapiens
gctgtaagcttcaga

SEQ ID NO: 162707 - DNA, 15 bp, Homo sapiens
ctgtaagcttcagat

SEQ ID NO: 162708 - DNA, 15 bp, Homo sapiens
tgtaagcttcagatg

SEQ ID NO: 162709 - DNA, 15 bp, Homo sapiens
gtaagcttcagatga

SEQ ID NO: 162710 - DNA, 15 bp, Homo sapiens
taagcttcagatgag

SEQ ID NO: 162711 - DNA, 15 bp, Homo sapiens
aagcttcagatgagt

SEQ ID NO: 162712 - DNA, 15 bp, Homo sapiens
agcttcagatgagtt

SEQ ID NO: 162713 - DNA, 15 bp, Homo sapiens
gcttcagatgagttg

SEQ ID NO: 162714 - DNA, 15 bp, Homo sapiens
cttcagatgagttgc

SEQ ID NO: 162715 - DNA, 15 bp, Homo sapiens
ttcagatgagttgcc

SEQ ID NO: 162716 - DNA, 15 bp, Homo sapiens
tcagatgagttgcct

SEQ ID NO: 162717 - DNA, 15 bp, Homo sapiens
cagatgagttgcctc

SEQ ID NO: 162718 - DNA, 15 bp, Homo sapiens
agatgagttgcctcc

SEQ ID NO: 162719 - DNA, 15 bp, Homo sapiens
gatgagttgcctcca

SEQ ID NO: 162720 - DNA, 15 bp, Homo sapiens
atgagttgcctccaa

SEQ ID NO: 162721 - DNA, 15 bp, Homo sapiens
tgagttgcctccaac

SEQ ID NO: 162722 - DNA, 15 bp, Homo sapiens
gagttgcctccaacc

SEQ ID NO: 162723 - DNA, 15 bp, Homo sapiens
agttgcctccaacca

SEQ ID NO: 162724 - DNA, 15 bp, Homo sapiens
gttgcctccaaccac

SEQ ID NO: 162725 - DNA, 15 bp, Homo sapiens
ttgcctccaaccacc

SEQ ID NO: 162726 - DNA, 15 bp, Homo sapiens
tgcctccaaccacca

SEQ ID NO: 162727 - DNA, 15 bp, Homo sapiens
gcctccaaccaccat

SEQ ID NO: 162728 - DNA, 15 bp, Homo sapiens
cctccaaccaccatg

SEQ ID NO: 162729 - DNA, 15 bp, Homo sapiens
ctccaaccaccatgc

SEQ ID NO: 162730 - DNA, 15 bp, Homo sapiens
tccaaccaccatgct

SEQ ID NO: 162731 - DNA, 15 bp, Homo sapiens
ccaaccaccatgctc

SEQ ID NO: 162732 - DNA, 15 bp, Homo sapiens
caaccaccatgctcc

SEQ ID NO: 162733 - DNA, 15 bp, Homo sapiens
aaccaccatgctcct

SEQ ID NO: 162734 - DNA, 15 bp, Homo sapiens
accaccatgctcctg

SEQ ID NO: 162735 - DNA, 15 bp, Homo sapiens
ccaccatgctcctgt

SEQ ID NO: 162736 - DNA, 15 bp, Homo sapiens
caccatgctcctgta

SEQ ID NO: 162737 - DNA, 15 bp, Homo sapiens
accatgctcctgtag

SEQ ID NO: 162738 - DNA, 15 bp, Homo sapiens
ccatgctcctgtagg

SEQ ID NO: 162739 - DNA, 15 bp, Homo sapiens
catgctcctgtaggc

SEQ ID NO: 162740 - DNA, 15 bp, Homo sapiens
atgctcctgtaggcc

SEQ ID NO: 162741 - DNA, 15 bp, Homo sapiens
tgctcctgtaggcct

SEQ ID NO: 162742 - DNA, 15 bp, Homo sapiens
gctcctgtaggcctg

SEQ ID NO: 162743 - DNA, 15 bp, Homo sapiens
ctcctgtaggcctgg

SEQ ID NO: 162744 - DNA, 15 bp, Homo sapiens
tcctgtaggcctggc

SEQ ID NO: 162745 - DNA, 15 bp, Homo sapiens
cctgtaggcctggct

SEQ ID NO: 162746 - DNA, 15 bp, Homo sapiens
ctgtaggcctggctt

SEQ ID NO: 162747 - DNA, 15 bp, Homo sapiens
tgtaggcctggcttg

SEQ ID NO: 162748 - DNA, 15 bp, Homo sapiens
gtaggcctggcttga

SEQ ID NO: 162749 - DNA, 15 bp, Homo sapiens
taggcctggcttgaa

SEQ ID NO: 162750 - DNA, 15 bp, Homo sapiens
aggcctggcttgaaa

SEQ ID NO: 162751 - DNA, 15 bp, Homo sapiens
ggcctggcttgaaat

SEQ ID NO: 162752 - DNA, 15 bp, Homo sapiens
gcctggcttgaaatg

SEQ ID NO: 162753 - DNA, 15 bp, Homo sapiens
cctggcttgaaatgc

SEQ ID NO: 162754 - DNA, 15 bp, Homo sapiens
ctggcttgaaatgcc

SEQ ID NO: 162755 - DNA, 15 bp, Homo sapiens
tggcttgaaatgccc

SEQ ID NO: 162756 - DNA, 15 bp, Homo sapiens
ggcttgaaatgccct

SEQ ID NO: 162757 - DNA, 15 bp, Homo sapiens
gcttgaaatgccctt

SEQ ID NO: 162758 - DNA, 15 bp, Homo sapiens
cttgaaatgcccttc

SEQ ID NO: 162759 - DNA, 15 bp, Homo sapiens
ttgaaatgcccttct

SEQ ID NO: 162760 - DNA, 15 bp, Homo sapiens
tgaaatgcccttctt

SEQ ID NO: 162761 - DNA, 15 bp, Homo sapiens
gaaatgcccttcttc

SEQ ID NO: 162762 - DNA, 15 bp, Homo sapiens
aaatgcccttcttct

SEQ ID NO: 162763 - DNA, 15 bp, Homo sapiens
aatgcccttcttctg

SEQ ID NO: 162764 - DNA, 15 bp, Homo sapiens
atgcccttcttctgt

SEQ ID NO: 162765 - DNA, 15 bp, Homo sapiens
tgcccttcttctgtc

SEQ ID NO: 162766 - DNA, 15 bp, Homo sapiens
gcccttcttctgtca

SEQ ID NO: 162767 - DNA, 15 bp, Homo sapiens
cccttcttctgtcac

SEQ ID NO: 162768 - DNA, 15 bp, Homo sapiens
ccttcttctgtcaca

SEQ ID NO: 162769 - DNA, 15 bp, Homo sapiens
cttcttctgtcacag

SEQ ID NO: 162770 - DNA, 15 bp, Homo sapiens
ttcttctgtcacagg

SEQ ID NO: 162771 - DNA, 15 bp, Homo sapiens
tcttctgtcacaggg

SEQ ID NO: 162772 - DNA, 15 bp, Homo sapiens
cttctgtcacagggt

SEQ ID NO: 162773 - DNA, 15 bp, Homo sapiens
ttctgtcacagggtc

SEQ ID NO: 162774 - DNA, 15 bp, Homo sapiens
tctgtcacagggtct

SEQ ID NO: 162775 - DNA, 15 bp, Homo sapiens
ctgtcacagggtctg

SEQ ID NO: 162776 - DNA, 15 bp, Homo sapiens
tgtcacagggtctgg

SEQ ID NO: 162777 - DNA, 15 bp, Homo sapiens
gtcacagggtctggt

SEQ ID NO: 162778 - DNA, 15 bp, Homo sapiens
tcacagggtctggta

SEQ ID NO: 162779 - DNA, 15 bp, Homo sapiens
cacagggtctggtag

SEQ ID NO: 162780 - DNA, 15 bp, Homo sapiens
acagggtctggtagt

SEQ ID NO: 162781 - DNA, 15 bp, Homo sapiens
cagggtctggtagta

SEQ ID NO: 162782 - DNA, 15 bp, Homo sapiens
agggtctggtagtat

SEQ ID NO: 162783 - DNA, 15 bp, Homo sapiens
gggtctggtagtata

SEQ ID NO: 162784 - DNA, 15 bp, Homo sapiens
ggtctggtagtatat

SEQ ID NO: 162785 - DNA, 15 bp, Homo sapiens
gtctggtagtatatc

SEQ ID NO: 162786 - DNA, 15 bp, Homo sapiens
tctggtagtatatcc

SEQ ID NO: 162787 - DNA, 15 bp, Homo sapiens
ctggtagtatatccc

SEQ ID NO: 162788 - DNA, 15 bp, Homo sapiens
tggtagtatatccct

SEQ ID NO: 162789 - DNA, 15 bp, Homo sapiens
ggtagtatatccctt

SEQ ID NO: 162790 - DNA, 15 bp, Homo sapiens
gtagtatatcccttg

SEQ ID NO: 162791 - DNA, 15 bp, Homo sapiens
tagtatatcccttgc

SEQ ID NO: 162792 - DNA, 15 bp, Homo sapiens
agtatatcccttgcc

SEQ ID NO: 162793 - DNA, 15 bp, Homo sapiens
gtatatcccttgccc

SEQ ID NO: 162794 - DNA, 15 bp, Homo sapiens
tatatcccttgccct

SEQ ID NO: 162795 - DNA, 15 bp, Homo sapiens
atatcccttgccctt

SEQ ID NO: 162796 - DNA, 15 bp, Homo sapiens
tatcccttgcccttc

SEQ ID NO: 162797 - DNA, 15 bp, Homo sapiens
atcccttgcccttca

SEQ ID NO: 162798 - DNA, 15 bp, Homo sapiens
tcccttgcccttcaa

SEQ ID NO: 162799 - DNA, 15 bp, Homo sapiens
cccttgcccttcaag

SEQ ID NO: 162800 - DNA, 15 bp, Homo sapiens
ccttgcccttcaaga

SEQ ID NO: 162801 - DNA, 15 bp, Homo sapiens
cttgcccttcaagat

SEQ ID NO: 162802 - DNA, 15 bp, Homo sapiens
ttgcccttcaagatt

SEQ ID NO: 162803 - DNA, 15 bp, Homo sapiens
tgcccttcaagattt

SEQ ID NO: 162804 - DNA, 15 bp, Homo sapiens
gcccttcaagattta

SEQ ID NO: 162805 - DNA, 15 bp, Homo sapiens
cccttcaagatttag

SEQ ID NO: 162806 - DNA, 15 bp, Homo sapiens
ccttcaagatttagc

SEQ ID NO: 162807 - DNA, 15 bp, Homo sapiens
cttcaagatttagct

SEQ ID NO: 162808 - DNA, 15 bp, Homo sapiens
ttcaagatttagcta

SEQ ID NO: 162809 - DNA, 15 bp, Homo sapiens
tcaagatttagctaa

SEQ ID NO: 162810 - DNA, 15 bp, Homo sapiens
caagatttagctaaa

SEQ ID NO: 162811 - DNA, 15 bp, Homo sapiens
aagatttagctaaaa

SEQ ID NO: 162812 - DNA, 15 bp, Homo sapiens
agatttagctaaaat

SEQ ID NO: 162813 - DNA, 15 bp, Homo sapiens
gatttagctaaaatg

SEQ ID NO: 162814 - DNA, 15 bp, Homo sapiens
atttagctaaaatgt

SEQ ID NO: 162815 - DNA, 15 bp, Homo sapiens
tttagctaaaatgtg

SEQ ID NO: 162816 - DNA, 15 bp, Homo sapiens
ttagctaaaatgtga

SEQ ID NO: 162817 - DNA, 15 bp, Homo sapiens
tagctaaaatgtgaa

SEQ ID NO: 162818 - DNA, 15 bp, Homo sapiens
agctaaaatgtgaag

SEQ ID NO: 162819 - DNA, 15 bp, Homo sapiens
gctaaaatgtgaagc

SEQ ID NO: 162820 - DNA, 15 bp, Homo sapiens
ctaaaatgtgaagct

SEQ ID NO: 162821 - DNA, 15 bp, Homo sapiens
taaaatgtgaagctt

SEQ ID NO: 162822 - DNA, 15 bp, Homo sapiens
aaaatgtgaagcttt

SEQ ID NO: 162823 - DNA, 15 bp, Homo sapiens
aaatgtgaagctttc

SEQ ID NO: 162824 - DNA, 15 bp, Homo sapiens
aatgtgaagctttcc

SEQ ID NO: 162825 - DNA, 15 bp, Homo sapiens
atgtgaagctttcct

SEQ ID NO: 162826 - DNA, 15 bp, Homo sapiens
tgtgaagctttcctt

SEQ ID NO: 162827 - DNA, 15 bp, Homo sapiens
gtgaagctttcctta

SEQ ID NO: 162828 - DNA, 15 bp, Homo sapiens
tgaagctttccttac

SEQ ID NO: 162829 - DNA, 15 bp, Homo sapiens
gaagctttccttacc

SEQ ID NO: 162830 - DNA, 15 bp, Homo sapiens
aagctttccttacct

SEQ ID NO: 162831 - DNA, 15 bp, Homo sapiens
agctttccttacctg

SEQ ID NO: 162832 - DNA, 15 bp, Homo sapiens
gctttccttacctgc

SEQ ID NO: 162833 - DNA, 15 bp, Homo sapiens
ctttccttacctgct

SEQ ID NO: 162834 - DNA, 15 bp, Homo sapiens
tttccttacctgctg

SEQ ID NO: 162835 - DNA, 15 bp, Homo sapiens
ttccttacctgctgg

SEQ ID NO: 162836 - DNA, 15 bp, Homo sapiens
tccttacctgctggg

SEQ ID NO: 162837 - DNA, 15 bp, Homo sapiens
ccttacctgctggga

SEQ ID NO: 162838 - DNA, 15 bp, Homo sapiens
cttacctgctgggag

SEQ ID NO: 162839 - DNA, 15 bp, Homo sapiens
ttacctgctgggagg

SEQ ID NO: 162840 - DNA, 15 bp, Homo sapiens
tacctgctgggaggt

SEQ ID NO: 162841 - DNA, 15 bp, Homo sapiens
acctgctgggaggtg

SEQ ID NO: 162842 - DNA, 15 bp, Homo sapiens
cctgctgggaggtgt

SEQ ID NO: 162843 - DNA, 15 bp, Homo sapiens
ctgctgggaggtgtt

SEQ ID NO: 162844 - DNA, 15 bp, Homo sapiens
tgctgggaggtgttc

SEQ ID NO: 162845 - DNA, 15 bp, Homo sapiens
gctgggaggtgttct

SEQ ID NO: 162846 - DNA, 15 bp, Homo sapiens
ctgggaggtgttctc

SEQ ID NO: 162847 - DNA, 15 bp, Homo sapiens
tgggaggtgttctct

SEQ ID NO: 162848 - DNA, 15 bp, Homo sapiens
gggaggtgttctctc

SEQ ID NO: 162849 - DNA, 15 bp, Homo sapiens
ggaggtgttctctct

SEQ ID NO: 162850 - DNA, 15 bp, Homo sapiens
gaggtgttctctctt

SEQ ID NO: 162851 - DNA, 15 bp, Homo sapiens
aggtgttctctcttt

SEQ ID NO: 162852 - DNA, 15 bp, Homo sapiens
ggtgttctctctttt

SEQ ID NO: 162853 - DNA, 15 bp, Homo sapiens
gtgttctctcttttc

SEQ ID NO: 162854 - DNA, 15 bp, Homo sapiens
tgttctctcttttct

SEQ ID NO: 162855 - DNA, 15 bp, Homo sapiens
gttctctcttttctc

SEQ ID NO: 162856 - DNA, 15 bp, Homo sapiens
ttctctcttttctct

SEQ ID NO: 162857 - DNA, 15 bp, Homo sapiens
tctctcttttctctg

SEQ ID NO: 162858 - DNA, 15 bp, Homo sapiens
ctctcttttctctgt

SEQ ID NO: 162859 - DNA, 15 bp, Homo sapiens
tctcttttctctgtg

SEQ ID NO: 162860 - DNA, 15 bp, Homo sapiens
ctcttttctctgtgc

SEQ ID NO: 162861 - DNA, 15 bp, Homo sapiens
tcttttctctgtgct

SEQ ID NO: 162862 - DNA, 15 bp, Homo sapiens
cttttctctgtgctc

SEQ ID NO: 162863 - DNA, 15 bp, Homo sapiens
ttttctctgtgctct

SEQ ID NO: 162864 - DNA, 15 bp, Homo sapiens
tttctctgtgctctc

SEQ ID NO: 162865 - DNA, 15 bp, Homo sapiens
ttctctgtgctctca

SEQ ID NO: 162866 - DNA, 15 bp, Homo sapiens
tctctgtgctctcag

SEQ ID NO: 162867 - DNA, 15 bp, Homo sapiens
ctctgtgctctcaga

SEQ ID NO: 162868 - DNA, 15 bp, Homo sapiens
tctgtgctctcagag

SEQ ID NO: 162869 - DNA, 15 bp, Homo sapiens
ctgtgctctcagagt

SEQ ID NO: 162870 - DNA, 15 bp, Homo sapiens
tgtgctctcagagtc

SEQ ID NO: 162871 - DNA, 15 bp, Homo sapiens
gtgctctcagagtcc

SEQ ID NO: 162872 - DNA, 15 bp, Homo sapiens
tgctctcagagtcct

SEQ ID NO: 162873 - DNA, 15 bp, Homo sapiens
gctctcagagtcctt

SEQ ID NO: 162874 - DNA, 15 bp, Homo sapiens
ctctcagagtcctta

SEQ ID NO: 162875 - DNA, 15 bp, Homo sapiens
tctcagagtccttag

SEQ ID NO: 162876 - DNA, 15 bp, Homo sapiens
ctcagagtccttagt

SEQ ID NO: 162877 - DNA, 15 bp, Homo sapiens
tcagagtccttagtc

SEQ ID NO: 162878 - DNA, 15 bp, Homo sapiens
cagagtccttagtcc

SEQ ID NO: 162879 - DNA, 15 bp, Homo sapiens
agagtccttagtcca

SEQ ID NO: 162880 - DNA, 15 bp, Homo sapiens
gagtccttagtccat

SEQ ID NO: 162881 - DNA, 15 bp, Homo sapiens
agtccttagtccatg

SEQ ID NO: 162882 - DNA, 15 bp, Homo sapiens
gtccttagtccatgc

SEQ ID NO: 162883 - DNA, 15 bp, Homo sapiens
tccttagtccatgcc

SEQ ID NO: 162884 - DNA, 15 bp, Homo sapiens
ccttagtccatgcct

SEQ ID NO: 162885 - DNA, 15 bp, Homo sapiens
cttagtccatgcctc

SEQ ID NO: 162886 - DNA, 15 bp, Homo sapiens
ttagtccatgcctcc

SEQ ID NO: 162887 - DNA, 15 bp, Homo sapiens
tagtccatgcctcca

SEQ ID NO: 162888 - DNA, 15 bp, Homo sapiens
agtccatgcctccag

SEQ ID NO: 162889 - DNA, 15 bp, Homo sapiens
gtccatgcctccagt

SEQ ID NO: 162890 - DNA, 15 bp, Homo sapiens
tccatgcctccagta

SEQ ID NO: 162891 - DNA, 15 bp, Homo sapiens
ccatgcctccagtac

SEQ ID NO: 162892 - DNA, 15 bp, Homo sapiens
catgcctccagtaca

SEQ ID NO: 162893 - DNA, 15 bp, Homo sapiens
atgcctccagtacaa

SEQ ID NO: 162894 - DNA, 15 bp, Homo sapiens
tgcctccagtacaac

SEQ ID NO: 162895 - DNA, 15 bp, Homo sapiens
gcctccagtacaacg

SEQ ID NO: 162896 - DNA, 15 bp, Homo sapiens
cctccagtacaacgt

SEQ ID NO: 162897 - DNA, 15 bp, Homo sapiens
ctccagtacaacgta

SEQ ID NO: 162898 - DNA, 15 bp, Homo sapiens
tccagtacaacgtac

SEQ ID NO: 162899 - DNA, 15 bp, Homo sapiens
ccagtacaacgtaca

SEQ ID NO: 162900 - DNA, 15 bp, Homo sapiens
cagtacaacgtacat

SEQ ID NO: 162901 - DNA, 15 bp, Homo sapiens
agtacaacgtacatc

SEQ ID NO: 162902 - DNA, 15 bp, Homo sapiens
gtacaacgtacatcc

SEQ ID NO: 162903 - DNA, 15 bp, Homo sapiens
tacaacgtacatcca

SEQ ID NO: 162904 - DNA, 15 bp, Homo sapiens
acaacgtacatccac

SEQ ID NO: 162905 - DNA, 15 bp, Homo sapiens
caacgtacatccact

SEQ ID NO: 162906 - DNA, 15 bp, Homo sapiens
aacgtacatccactt

SEQ ID NO: 162907 - DNA, 15 bp, Homo sapiens
acgtacatccactta

SEQ ID NO: 162908 - DNA, 15 bp, Homo sapiens
cgtacatccacttac

SEQ ID NO: 162909 - DNA, 15 bp, Homo sapiens
gtacatccacttaca

SEQ ID NO: 162910 - DNA, 15 bp, Homo sapiens
tacatccacttacat

SEQ ID NO: 162911 - DNA, 15 bp, Homo sapiens
acatccacttacatg

SEQ ID NO: 162912 - DNA, 15 bp, Homo sapiens
catccacttacatgg

SEQ ID NO: 162913 - DNA, 15 bp, Homo sapiens
atccacttacatggt

SEQ ID NO: 162914 - DNA, 15 bp, Homo sapiens
tccacttacatggta

SEQ ID NO: 162915 - DNA, 15 bp, Homo sapiens
ccacttacatggtaa

SEQ ID NO: 162916 - DNA, 15 bp, Homo sapiens
cacttacatggtaat

SEQ ID NO: 162917 - DNA, 15 bp, Homo sapiens
acttacatggtaatt

SEQ ID NO: 162918 - DNA, 15 bp, Homo sapiens
cttacatggtaattt

SEQ ID NO: 162919 - DNA, 15 bp, Homo sapiens
ttacatggtaatttc

SEQ ID NO: 162920 - DNA, 15 bp, Homo sapiens
tacatggtaatttcc

SEQ ID NO: 162921 - DNA, 15 bp, Homo sapiens
acatggtaatttcct

SEQ ID NO: 162922 - DNA, 15 bp, Homo sapiens
catggtaatttcctg

SEQ ID NO: 162923 - DNA, 15 bp, Homo sapiens
atggtaatttcctgt

SEQ ID NO: 162924 - DNA, 15 bp, Homo sapiens
tggtaatttcctgtt

SEQ ID NO: 162925 - DNA, 15 bp, Homo sapiens
ggtaatttcctgttt

SEQ ID NO: 162926 - DNA, 15 bp, Homo sapiens
gtaatttcctgttta

SEQ ID NO: 162927 - DNA, 15 bp, Homo sapiens
taatttcctgtttac

SEQ ID NO: 162928 - DNA, 15 bp, Homo sapiens
aatttcctgtttaca

SEQ ID NO: 162929 - DNA, 15 bp, Homo sapiens
atttcctgtttacat

SEQ ID NO: 162930 - DNA, 15 bp, Homo sapiens
tttcctgtttacata

SEQ ID NO: 162931 - DNA, 15 bp, Homo sapiens
ttcctgtttacatac

SEQ ID NO: 162932 - DNA, 15 bp, Homo sapiens
tcctgtttacatact

SEQ ID NO: 162933 - DNA, 15 bp, Homo sapiens
cctgtttacatactt

SEQ ID NO: 162934 - DNA, 15 bp, Homo sapiens
ctgtttacatacttt

SEQ ID NO: 162935 - DNA, 15 bp, Homo sapiens
tgtttacatactttt

SEQ ID NO: 162936 - DNA, 15 bp, Homo sapiens
gtttacatacttttc

SEQ ID NO: 162937 - DNA, 15 bp, Homo sapiens
tttacatacttttcc

SEQ ID NO: 162938 - DNA, 15 bp, Homo sapiens
ttacatacttttcct

SEQ ID NO: 162939 - DNA, 15 bp, Homo sapiens
tacatacttttccta

SEQ ID NO: 162940 - DNA, 15 bp, Homo sapiens
acatacttttcctac

SEQ ID NO: 162941 - DNA, 15 bp, Homo sapiens
catacttttcctact

SEQ ID NO: 162942 - DNA, 15 bp, Homo sapiens
atacttttcctactc

SEQ ID NO: 162943 - DNA, 15 bp, Homo sapiens
tacttttcctactcg

SEQ ID NO: 162944 - DNA, 15 bp, Homo sapiens
acttttcctactcgg

SEQ ID NO: 162945 - DNA, 15 bp, Homo sapiens
cttttcctactcgga

SEQ ID NO: 162946 - DNA, 15 bp, Homo sapiens
ttttcctactcggag

SEQ ID NO: 162947 - DNA, 15 bp, Homo sapiens
tttcctactcggagt

SEQ ID NO: 162948 - DNA, 15 bp, Homo sapiens
ttcctactcggagtg

SEQ ID NO: 162949 - DNA, 15 bp, Homo sapiens
tcctactcggagtgg

SEQ ID NO: 162950 - DNA, 15 bp, Homo sapiens
cctactcggagtgga

SEQ ID NO: 162951 - DNA, 15 bp, Homo sapiens
ctactcggagtggag

SEQ ID NO: 162952 - DNA, 15 bp, Homo sapiens
tactcggagtggagt

SEQ ID NO: 162953 - DNA, 15 bp, Homo sapiens
actcggagtggagtc

SEQ ID NO: 162954 - DNA, 15 bp, Homo sapiens
ctcggagtggagtct

SEQ ID NO: 162955 - DNA, 15 bp, Homo sapiens
tcggagtggagtctg

SEQ ID NO: 162956 - DNA, 15 bp, Homo sapiens
cggagtggagtctgt

SEQ ID NO: 162957 - DNA, 15 bp, Homo sapiens
ggagtggagtctgtt

SEQ ID NO: 162958 - DNA, 15 bp, Homo sapiens
gagtggagtctgttt

SEQ ID NO: 162959 - DNA, 15 bp, Homo sapiens
agtggagtctgtttc

SEQ ID NO: 162960 - DNA, 15 bp, Homo sapiens
gtggagtctgtttct

SEQ ID NO: 162961 - DNA, 15 bp, Homo sapiens
tggagtctgtttctt

SEQ ID NO: 162962 - DNA, 15 bp, Homo sapiens
ggagtctgtttctta

SEQ ID NO: 162963 - DNA, 15 bp, Homo sapiens
gagtctgtttcttaa

SEQ ID NO: 162964 - DNA, 15 bp, Homo sapiens
agtctgtttcttaat

SEQ ID NO: 162965 - DNA, 15 bp, Homo sapiens
gtctgtttcttaata

SEQ ID NO: 162966 - DNA, 15 bp, Homo sapiens
tctgtttcttaataa

SEQ ID NO: 162967 - DNA, 15 bp, Homo sapiens
ctgtttcttaataat

SEQ ID NO: 162968 - DNA, 15 bp, Homo sapiens
tgtttcttaataatt

SEQ ID NO: 162969 - DNA, 15 bp, Homo sapiens
gtttcttaataattt

SEQ ID NO: 162970 - DNA, 15 bp, Homo sapiens
tttcttaataatttt

SEQ ID NO: 162971 - DNA, 15 bp, Homo sapiens
ttcttaataattttg

SEQ ID NO: 162972 - DNA, 15 bp, Homo sapiens
tcttaataattttgc

SEQ ID NO: 162973 - DNA, 15 bp, Homo sapiens
cttaataattttgcc

SEQ ID NO: 162974 - DNA, 15 bp, Homo sapiens
ttaataattttgcct

SEQ ID NO: 162975 - DNA, 15 bp, Homo sapiens
taataattttgcctc

SEQ ID NO: 162976 - DNA, 15 bp, Homo sapiens
aataattttgcctct

SEQ ID NO: 162977 - DNA, 15 bp, Homo sapiens
ataattttgcctctc

SEQ ID NO: 162978 - DNA, 15 bp, Homo sapiens
taattttgcctctcc

SEQ ID NO: 162979 - DNA, 15 bp, Homo sapiens
aattttgcctctccc

SEQ ID NO: 162980 - DNA, 15 bp, Homo sapiens
attttgcctctccca

SEQ ID NO: 162981 - DNA, 15 bp, Homo sapiens
ttttgcctctcccat

SEQ ID NO: 162982 - DNA, 15 bp, Homo sapiens
tttgcctctcccatg

SEQ ID NO: 162983 - DNA, 15 bp, Homo sapiens
ttgcctctcccatgc

SEQ ID NO: 162984 - DNA, 15 bp, Homo sapiens
tgcctctcccatgcc

SEQ ID NO: 162985 - DNA, 15 bp, Homo sapiens
gcctctcccatgccc

SEQ ID NO: 162986 - DNA, 15 bp, Homo sapiens
cctctcccatgccct

SEQ ID NO: 162987 - DNA, 15 bp, Homo sapiens
ctctcccatgcccta

SEQ ID NO: 162988 - DNA, 15 bp, Homo sapiens
tctcccatgccctag

SEQ ID NO: 162989 - DNA, 15 bp, Homo sapiens
ctcccatgccctagc

SEQ ID NO: 162990 - DNA, 15 bp, Homo sapiens
tcccatgccctagca

SEQ ID NO: 162991 - DNA, 15 bp, Homo sapiens
cccatgccctagcac

SEQ ID NO: 162992 - DNA, 15 bp, Homo sapiens
ccatgccctagcaca

SEQ ID NO: 162993 - DNA, 15 bp, Homo sapiens
catgccctagcacag

SEQ ID NO: 162994 - DNA, 15 bp, Homo sapiens
atgccctagcacagt

SEQ ID NO: 162995 - DNA, 15 bp, Homo sapiens
tgccctagcacagtg

SEQ ID NO: 162996 - DNA, 15 bp, Homo sapiens
gccctagcacagtgc

SEQ ID NO: 162997 - DNA, 15 bp, Homo sapiens
ccctagcacagtgca

SEQ ID NO: 162998 - DNA, 15 bp, Homo sapiens
cctagcacagtgcat

SEQ ID NO: 162999 - DNA, 15 bp, Homo sapiens
ctagcacagtgcatc

SEQ ID NO: 163000 - DNA, 15 bp, Homo sapiens
tagcacagtgcatcc

SEQ ID NO: 163001 - DNA, 15 bp, Homo sapiens
agcacagtgcatcca

SEQ ID NO: 163002 - DNA, 15 bp, Homo sapiens
gcacagtgcatccag

SEQ ID NO: 163003 - DNA, 15 bp, Homo sapiens
cacagtgcatccagc

SEQ ID NO: 163004 - DNA, 15 bp, Homo sapiens
acagtgcatccagcg

SEQ ID NO: 163005 - DNA, 15 bp, Homo sapiens
cagtgcatccagcgt

SEQ ID NO: 163006 - DNA, 15 bp, Homo sapiens
agtgcatccagcgta

SEQ ID NO: 163007 - DNA, 15 bp, Homo sapiens
gtgcatccagcgtat

SEQ ID NO: 163008 - DNA, 15 bp, Homo sapiens
tgcatccagcgtata

SEQ ID NO: 163009 - DNA, 15 bp, Homo sapiens
gcatccagcgtatag

SEQ ID NO: 163010 - DNA, 15 bp, Homo sapiens
catccagcgtatagc

SEQ ID NO: 163011 - DNA, 15 bp, Homo sapiens
atccagcgtatagcc

SEQ ID NO: 163012 - DNA, 15 bp, Homo sapiens
tccagcgtatagccc

SEQ ID NO: 163013 - DNA, 15 bp, Homo sapiens
ccagcgtatagcccc

SEQ ID NO: 163014 - DNA, 15 bp, Homo sapiens
cagcgtatagcccct

SEQ ID NO: 163015 - DNA, 15 bp, Homo sapiens
agcgtatagcccctt

SEQ ID NO: 163016 - DNA, 15 bp, Homo sapiens
gcgtatagcccctta

SEQ ID NO: 163017 - DNA, 15 bp, Homo sapiens
cgtatagccccttat

SEQ ID NO: 163018 - DNA, 15 bp, Homo sapiens
gtatagccccttatt

SEQ ID NO: 163019 - DNA, 15 bp, Homo sapiens
tatagccccttattc

SEQ ID NO: 163020 - DNA, 15 bp, Homo sapiens
atagccccttattca

SEQ ID NO: 163021 - DNA, 15 bp, Homo sapiens
tagccccttattcag

SEQ ID NO: 163022 - DNA, 15 bp, Homo sapiens
agccccttattcagt

SEQ ID NO: 163023 - DNA, 15 bp, Homo sapiens
gccccttattcagtt

SEQ ID NO: 163024 - DNA, 15 bp, Homo sapiens
ccccttattcagttg

SEQ ID NO: 163025 - DNA, 15 bp, Homo sapiens
cccttattcagttgg

SEQ ID NO: 163026 - DNA, 15 bp, Homo sapiens
ccttattcagttggt

SEQ ID NO: 163027 - DNA, 15 bp, Homo sapiens
cttattcagttggta

SEQ ID NO: 163028 - DNA, 15 bp, Homo sapiens
ttattcagttggtag

SEQ ID NO: 163029 - DNA, 15 bp, Homo sapiens
tattcagttggtaga

SEQ ID NO: 163030 - DNA, 15 bp, Homo sapiens
attcagttggtagat

SEQ ID NO: 163031 - DNA, 15 bp, Homo sapiens
ttcagttggtagata

SEQ ID NO: 163032 - DNA, 15 bp, Homo sapiens
tcagttggtagatat

SEQ ID NO: 163033 - DNA, 15 bp, Homo sapiens
cagttggtagatatt

SEQ ID NO: 163034 - DNA, 15 bp, Homo sapiens
agttggtagatattt

SEQ ID NO: 163035 - DNA, 15 bp, Homo sapiens
gttggtagatatttg

SEQ ID NO: 163036 - DNA, 15 bp, Homo sapiens
ttggtagatatttgg

SEQ ID NO: 163037 - DNA, 15 bp, Homo sapiens
tggtagatatttggc

SEQ ID NO: 163038 - DNA, 15 bp, Homo sapiens
ggtagatatttggcc

SEQ ID NO: 163039 - DNA, 15 bp, Homo sapiens
gtagatatttggcca

SEQ ID NO: 163040 - DNA, 15 bp, Homo sapiens
tagatatttggccac

SEQ ID NO: 163041 - DNA, 15 bp, Homo sapiens
agatatttggccact

SEQ ID NO: 163042 - DNA, 15 bp, Homo sapiens
gatatttggccactg

SEQ ID NO: 163043 - DNA, 15 bp, Homo sapiens
atatttggccactgt

SEQ ID NO: 163044 - DNA, 15 bp, Homo sapiens
tatttggccactgtt

SEQ ID NO: 163045 - DNA, 15 bp, Homo sapiens
atttggccactgttg

SEQ ID NO: 163046 - DNA, 15 bp, Homo sapiens
tttggccactgttgc

SEQ ID NO: 163047 - DNA, 15 bp, Homo sapiens
ttggccactgttgcc

SEQ ID NO: 163048 - DNA, 15 bp, Homo sapiens
tggccactgttgcct

SEQ ID NO: 163049 - DNA, 15 bp, Homo sapiens
ggccactgttgcctt

SEQ ID NO: 163050 - DNA, 15 bp, Homo sapiens
gccactgttgccttg

SEQ ID NO: 163051 - DNA, 15 bp, Homo sapiens
ccactgttgccttgt

SEQ ID NO: 163052 - DNA, 15 bp, Homo sapiens
cactgttgccttgtg

SEQ ID NO: 163053 - DNA, 15 bp, Homo sapiens
actgttgccttgtgg

SEQ ID NO: 163054 - DNA, 15 bp, Homo sapiens
ctgttgccttgtggg

SEQ ID NO: 163055 - DNA, 15 bp, Homo sapiens
tgttgccttgtggga

SEQ ID NO: 163056 - DNA, 15 bp, Homo sapiens
gttgccttgtgggat

SEQ ID NO: 163057 - DNA, 15 bp, Homo sapiens
ttgccttgtgggatc

SEQ ID NO: 163058 - DNA, 15 bp, Homo sapiens
tgccttgtgggatca

SEQ ID NO: 163059 - DNA, 15 bp, Homo sapiens
gccttgtgggatcat

SEQ ID NO: 163060 - DNA, 15 bp, Homo sapiens
ccttgtgggatcata

SEQ ID NO: 163061 - DNA, 15 bp, Homo sapiens
cttgtgggatcataa

SEQ ID NO: 163062 - DNA, 15 bp, Homo sapiens
ttgtgggatcataag

SEQ ID NO: 163063 - DNA, 15 bp, Homo sapiens
tgtgggatcataagt

SEQ ID NO: 163064 - DNA, 15 bp, Homo sapiens
gtgggatcataagtt

SEQ ID NO: 163065 - DNA, 15 bp, Homo sapiens
tgggatcataagttc

SEQ ID NO: 163066 - DNA, 15 bp, Homo sapiens
gggatcataagttct

SEQ ID NO: 163067 - DNA, 15 bp, Homo sapiens
ggatcataagttctg

SEQ ID NO: 163068 - DNA, 15 bp, Homo sapiens
gatcataagttctga

SEQ ID NO: 163069 - DNA, 15 bp, Homo sapiens
atcataagttctgat

SEQ ID NO: 163070 - DNA, 15 bp, Homo sapiens
tcataagttctgatg

SEQ ID NO: 163071 - DNA, 15 bp, Homo sapiens
cataagttctgatgt

SEQ ID NO: 163072 - DNA, 15 bp, Homo sapiens
ataagttctgatgta

SEQ ID NO: 163073 - DNA, 15 bp, Homo sapiens
taagttctgatgtat

SEQ ID NO: 163074 - DNA, 15 bp, Homo sapiens
aagttctgatgtatt

SEQ ID NO: 163075 - DNA, 15 bp, Homo sapiens
agttctgatgtattt

SEQ ID NO: 163076 - DNA, 15 bp, Homo sapiens
gttctgatgtatttg

SEQ ID NO: 163077 - DNA, 15 bp, Homo sapiens
ttctgatgtatttga

SEQ ID NO: 163078 - DNA, 15 bp, Homo sapiens
tctgatgtatttgag

SEQ ID NO: 163079 - DNA, 15 bp, Homo sapiens
ctgatgtatttgaga

SEQ ID NO: 163080 - DNA, 15 bp, Homo sapiens
tgatgtatttgagaa

SEQ ID NO: 163081 - DNA, 15 bp, Homo sapiens
gatgtatttgagaag

SEQ ID NO: 163082 - DNA, 15 bp, Homo sapiens
atgtatttgagaaga

SEQ ID NO: 163083 - DNA, 15 bp, Homo sapiens
tgtatttgagaagaa

SEQ ID NO: 163084 - DNA, 15 bp, Homo sapiens
gtatttgagaagaat

SEQ ID NO: 163085 - DNA, 15 bp, Homo sapiens
tatttgagaagaatt

SEQ ID NO: 163086 - DNA, 15 bp, Homo sapiens
atttgagaagaattt

SEQ ID NO: 163087 - DNA, 15 bp, Homo sapiens
tttgagaagaatttc

SEQ ID NO: 163088 - DNA, 15 bp, Homo sapiens
ttgagaagaatttct

SEQ ID NO: 163089 - DNA, 15 bp, Homo sapiens
tgagaagaatttcta

SEQ ID NO: 163090 - DNA, 15 bp, Homo sapiens
gagaagaatttctaa

SEQ ID NO: 163091 - DNA, 15 bp, Homo sapiens
agaagaatttctaaa

SEQ ID NO: 163092 - DNA, 15 bp, Homo sapiens
gaagaatttctaaaa

SEQ ID NO: 163093 - DNA, 15 bp, Homo sapiens
aagaatttctaaaat

SEQ ID NO: 163094 - DNA, 15 bp, Homo sapiens
agaatttctaaaatt

SEQ ID NO: 163095 - DNA, 15 bp, Homo sapiens
gaatttctaaaattc

SEQ ID NO: 163096 - DNA, 15 bp, Homo sapiens
aatttctaaaattct

SEQ ID NO: 163097 - DNA, 15 bp, Homo sapiens
atttctaaaattctg

SEQ ID NO: 163098 - DNA, 15 bp, Homo sapiens
tttctaaaattctga

SEQ ID NO: 163099 - DNA, 15 bp, Homo sapiens
ttctaaaattctgac

SEQ ID NO: 163100 - DNA, 15 bp, Homo sapiens
tctaaaattctgaca

SEQ ID NO: 163101 - DNA, 15 bp, Homo sapiens
ctaaaattctgacaa

SEQ ID NO: 163102 - DNA, 15 bp, Homo sapiens
taaaattctgacaaa

SEQ ID NO: 163103 - DNA, 15 bp, Homo sapiens
aaaattctgacaaaa

SEQ ID NO: 163104 - DNA, 15 bp, Homo sapiens
aaattctgacaaaat

SEQ ID NO: 163105 - DNA, 15 bp, Homo sapiens
aattctgacaaaatc

SEQ ID NO: 163106 - DNA, 15 bp, Homo sapiens
attctgacaaaatcc

SEQ ID NO: 163107 - DNA, 15 bp, Homo sapiens
ttctgacaaaatcct

SEQ ID NO: 163108 - DNA, 15 bp, Homo sapiens
tctgacaaaatcctg

SEQ ID NO: 163109 - DNA, 15 bp, Homo sapiens
ctgacaaaatcctga

SEQ ID NO: 163110 - DNA, 15 bp, Homo sapiens
tgacaaaatcctgaa

SEQ ID NO: 163111 - DNA, 15 bp, Homo sapiens
gacaaaatcctgaaa

SEQ ID NO: 163112 - DNA, 15 bp, Homo sapiens
acaaaatcctgaaac

SEQ ID NO: 163113 - DNA, 15 bp, Homo sapiens
caaaatcctgaaact

SEQ ID NO: 163114 - DNA, 15 bp, Homo sapiens
aaaatcctgaaactc

SEQ ID NO: 163115 - DNA, 15 bp, Homo sapiens
aaatcctgaaactca

SEQ ID NO: 163116 - DNA, 15 bp, Homo sapiens
aatcctgaaactcaa

SEQ ID NO: 163117 - DNA, 15 bp, Homo sapiens
atcctgaaactcaaa

SEQ ID NO: 163118 - DNA, 15 bp, Homo sapiens
tcctgaaactcaaat

SEQ ID NO: 163119 - DNA, 15 bp, Homo sapiens
cctgaaactcaaata

SEQ ID NO: 163120 - DNA, 15 bp, Homo sapiens
ctgaaactcaaatat

SEQ ID NO: 163121 - DNA, 15 bp, Homo sapiens
tgaaactcaaatatt

SEQ ID NO: 163122 - DNA, 15 bp, Homo sapiens
gaaactcaaatattg

SEQ ID NO: 163123 - DNA, 15 bp, Homo sapiens
aaactcaaatattga

SEQ ID NO: 163124 - DNA, 15 bp, Homo sapiens
aactcaaatattgac

SEQ ID NO: 163125 - DNA, 15 bp, Homo sapiens
actcaaatattgacc

SEQ ID NO: 163126 - DNA, 15 bp, Homo sapiens
ctcaaatattgaccc

SEQ ID NO: 163127 - DNA, 15 bp, Homo sapiens
tcaaatattgaccca

SEQ ID NO: 163128 - DNA, 15 bp, Homo sapiens
caaatattgacccag

SEQ ID NO: 163129 - DNA, 15 bp, Homo sapiens
aaatattgacccaga

SEQ ID NO: 163130 - DNA, 15 bp, Homo sapiens
aatattgacccagac

SEQ ID NO: 163131 - DNA, 15 bp, Homo sapiens
atattgacccagaca

SEQ ID NO: 163132 - DNA, 15 bp, Homo sapiens
tattgacccagacat

SEQ ID NO: 163133 - DNA, 15 bp, Homo sapiens
attgacccagacatg

SEQ ID NO: 163134 - DNA, 15 bp, Homo sapiens
ttgacccagacatga

SEQ ID NO: 163135 - DNA, 15 bp, Homo sapiens
tgacccagacatgag

SEQ ID NO: 163136 - DNA, 15 bp, Homo sapiens
gacccagacatgagc

SEQ ID NO: 163137 - DNA, 15 bp, Homo sapiens
acccagacatgagca

SEQ ID NO: 163138 - DNA, 15 bp, Homo sapiens
cccagacatgagcaa

SEQ ID NO: 163139 - DNA, 15 bp, Homo sapiens
ccagacatgagcaat

SEQ ID NO: 163140 - DNA, 15 bp, Homo sapiens
cagacatgagcaatt

SEQ ID NO: 163141 - DNA, 15 bp, Homo sapiens
agacatgagcaattt

SEQ ID NO: 163142 - DNA, 15 bp, Homo sapiens
gacatgagcaatttg

SEQ ID NO: 163143 - DNA, 15 bp, Homo sapiens
acatgagcaatttgc

SEQ ID NO: 163144 - DNA, 15 bp, Homo sapiens
catgagcaatttgct

SEQ ID NO: 163145 - DNA, 15 bp, Homo sapiens
atgagcaatttgctt

SEQ ID NO: 163146 - DNA, 15 bp, Homo sapiens
tgagcaatttgcttt

SEQ ID NO: 163147 - DNA, 15 bp, Homo sapiens
gagcaatttgctttt

SEQ ID NO: 163148 - DNA, 15 bp, Homo sapiens
agcaatttgcttttc

SEQ ID NO: 163149 - DNA, 15 bp, Homo sapiens
gcaatttgcttttca

SEQ ID NO: 163150 - DNA, 15 bp, Homo sapiens
caatttgcttttcaa

SEQ ID NO: 163151 - DNA, 15 bp, Homo sapiens
aatttgcttttcaaa

SEQ ID NO: 163152 - DNA, 15 bp, Homo sapiens
atttgcttttcaaat

SEQ ID NO: 163153 - DNA, 15 bp, Homo sapiens
tttgcttttcaaatg

SEQ ID NO: 163154 - DNA, 15 bp, Homo sapiens
ttgcttttcaaatgc

SEQ ID NO: 163155 - DNA, 15 bp, Homo sapiens
tgcttttcaaatgct

SEQ ID NO: 163156 - DNA, 15 bp, Homo sapiens
gcttttcaaatgcta

SEQ ID NO: 163157 - DNA, 15 bp, Homo sapiens
cttttcaaatgctaa

SEQ ID NO: 163158 - DNA, 15 bp, Homo sapiens
ttttcaaatgctaag

SEQ ID NO: 163159 - DNA, 15 bp, Homo sapiens
tttcaaatgctaagg

SEQ ID NO: 163160 - DNA, 15 bp, Homo sapiens
ttcaaatgctaaggg

SEQ ID NO: 163161 - DNA, 15 bp, Homo sapiens
tcaaatgctaaggga

SEQ ID NO: 163162 - DNA, 15 bp, Homo sapiens
caaatgctaagggat

SEQ ID NO: 163163 - DNA, 15 bp, Homo sapiens
aaatgctaagggatt

SEQ ID NO: 163164 - DNA, 15 bp, Homo sapiens
aatgctaagggattt

SEQ ID NO: 163165 - DNA, 15 bp, Homo sapiens
atgctaagggatttt

SEQ ID NO: 163166 - DNA, 15 bp, Homo sapiens
tgctaagggattttt

SEQ ID NO: 163167 - DNA, 15 bp, Homo sapiens
gctaagggattttta

SEQ ID NO: 163168 - DNA, 15 bp, Homo sapiens
ctaagggatttttaa

SEQ ID NO: 163169 - DNA, 15 bp, Homo sapiens
taagggatttttaat

SEQ ID NO: 163170 - DNA, 15 bp, Homo sapiens
aagggatttttaatg

SEQ ID NO: 163171 - DNA, 15 bp, Homo sapiens
agggatttttaatgg

SEQ ID NO: 163172 - DNA, 15 bp, Homo sapiens
gggatttttaatgga

SEQ ID NO: 163173 - DNA, 15 bp, Homo sapiens
ggatttttaatggat

SEQ ID NO: 163174 - DNA, 15 bp, Homo sapiens
gatttttaatggatt

SEQ ID NO: 163175 - DNA, 15 bp, Homo sapiens
atttttaatggattt

SEQ ID NO: 163176 - DNA, 15 bp, Homo sapiens
tttttaatggatttg

SEQ ID NO: 163177 - DNA, 15 bp, Homo sapiens
ttttaatggatttgc

SEQ ID NO: 163178 - DNA, 15 bp, Homo sapiens
tttaatggatttgct

SEQ ID NO: 163179 - DNA, 15 bp, Homo sapiens
ttaatggatttgctt

SEQ ID NO: 163180 - DNA, 15 bp, Homo sapiens
taatggatttgcttt

SEQ ID NO: 163181 - DNA, 15 bp, Homo sapiens
aatggatttgcttta

SEQ ID NO: 163182 - DNA, 15 bp, Homo sapiens
atggatttgctttaa

SEQ ID NO: 163183 - DNA, 15 bp, Homo sapiens
tggatttgctttaat

SEQ ID NO: 163184 - DNA, 15 bp, Homo sapiens
ggatttgctttaatt

SEQ ID NO: 163185 - DNA, 15 bp, Homo sapiens
gatttgctttaatta

SEQ ID NO: 163186 - DNA, 15 bp, Homo sapiens
atttgctttaattaa

SEQ ID NO: 163187 - DNA, 15 bp, Homo sapiens
tttgctttaattaaa

SEQ ID NO: 163188 - DNA, 15 bp, Homo sapiens
ttgctttaattaaat

SEQ ID NO: 163189 - DNA, 15 bp, Homo sapiens
tgctttaattaaatc

SEQ ID NO: 163190 - DNA, 15 bp, Homo sapiens
gctttaattaaatct

SEQ ID NO: 163191 - DNA, 15 bp, Homo sapiens
ctttaattaaatcta

SEQ ID NO: 163192 - DNA, 15 bp, Homo sapiens
tttaattaaatctag

SEQ ID NO: 163193 - DNA, 15 bp, Homo sapiens
ttaattaaatctagc

SEQ ID NO: 163194 - DNA, 15 bp, Homo sapiens
taattaaatctagcc

SEQ ID NO: 163195 - DNA, 15 bp, Homo sapiens
aattaaatctagcct

SEQ ID NO: 163196 - DNA, 15 bp, Homo sapiens
attaaatctagcctg

SEQ ID NO: 163197 - DNA, 15 bp, Homo sapiens
ttaaatctagcctgt

SEQ ID NO: 163198 - DNA, 15 bp, Homo sapiens
taaatctagcctgtt

SEQ ID NO: 163199 - DNA, 15 bp, Homo sapiens
aaatctagcctgttt

SEQ ID NO: 163200 - DNA, 15 bp, Homo sapiens
aatctagcctgtttc

SEQ ID NO: 163201 - DNA, 15 bp, Homo sapiens
atctagcctgtttct

SEQ ID NO: 163202 - DNA, 15 bp, Homo sapiens
tctagcctgtttcta

SEQ ID NO: 163203 - DNA, 15 bp, Homo sapiens
ctagcctgtttctaa

SEQ ID NO: 163204 - DNA, 15 bp, Homo sapiens
tagcctgtttctaag

SEQ ID NO: 163205 - DNA, 15 bp, Homo sapiens
agcctgtttctaagc

SEQ ID NO: 163206 - DNA, 15 bp, Homo sapiens
gcctgtttctaagct

SEQ ID NO: 163207 - DNA, 15 bp, Homo sapiens
cctgtttctaagctt

SEQ ID NO: 163208 - DNA, 15 bp, Homo sapiens
ctgtttctaagcttt

SEQ ID NO: 163209 - DNA, 15 bp, Homo sapiens
tgtttctaagcttta

SEQ ID NO: 163210 - DNA, 15 bp, Homo sapiens
gtttctaagctttat

SEQ ID NO: 163211 - DNA, 15 bp, Homo sapiens
tttctaagctttatt

SEQ ID NO: 163212 - DNA, 15 bp, Homo sapiens
ttctaagctttattc

SEQ ID NO: 163213 - DNA, 15 bp, Homo sapiens
tctaagctttattca

SEQ ID NO: 163214 - DNA, 15 bp, Homo sapiens
ctaagctttattcat

SEQ ID NO: 163215 - DNA, 15 bp, Homo sapiens
taagctttattcatt

SEQ ID NO: 163216 - DNA, 15 bp, Homo sapiens
aagctttattcatta

SEQ ID NO: 163217 - DNA, 15 bp, Homo sapiens
agctttattcattat

SEQ ID NO: 163218 - DNA, 15 bp, Homo sapiens
gctttattcattatt

SEQ ID NO: 163219 - DNA, 15 bp, Homo sapiens
ctttattcattattt

SEQ ID NO: 163220 - DNA, 15 bp, Homo sapiens
tttattcattatttc

SEQ ID NO: 163221 - DNA, 15 bp, Homo sapiens
ttattcattatttct

SEQ ID NO: 163222 - DNA, 15 bp, Homo sapiens
tattcattatttctc

SEQ ID NO: 163223 - DNA, 15 bp, Homo sapiens
attcattatttctcc

SEQ ID NO: 163224 - DNA, 15 bp, Homo sapiens
ttcattatttctcca

SEQ ID NO: 163225 - DNA, 15 bp, Homo sapiens
tcattatttctccat

SEQ ID NO: 163226 - DNA, 15 bp, Homo sapiens
cattatttctccata

SEQ ID NO: 163227 - DNA, 15 bp, Homo sapiens
attatttctccatac

SEQ ID NO: 163228 - DNA, 15 bp, Homo sapiens
ttatttctccatact

SEQ ID NO: 163229 - DNA, 15 bp, Homo sapiens
tatttctccatactc

SEQ ID NO: 163230 - DNA, 15 bp, Homo sapiens
atttctccatactca

SEQ ID NO: 163231 - DNA, 15 bp, Homo sapiens
tttctccatactcag

SEQ ID NO: 163232 - DNA, 15 bp, Homo sapiens
ttctccatactcaga

SEQ ID NO: 163233 - DNA, 15 bp, Homo sapiens
tctccatactcagag

SEQ ID NO: 163234 - DNA, 15 bp, Homo sapiens
ctccatactcagagc

SEQ ID NO: 163235 - DNA, 15 bp, Homo sapiens
tccatactcagagca

SEQ ID NO: 163236 - DNA, 15 bp, Homo sapiens
ccatactcagagcat

SEQ ID NO: 163237 - DNA, 15 bp, Homo sapiens
catactcagagcatt

SEQ ID NO: 163238 - DNA, 15 bp, Homo sapiens
atactcagagcattt

SEQ ID NO: 163239 - DNA, 15 bp, Homo sapiens
tactcagagcatttc

SEQ ID NO: 163240 - DNA, 15 bp, Homo sapiens
actcagagcatttct

SEQ ID NO: 163241 - DNA, 15 bp, Homo sapiens
ctcagagcatttctc

SEQ ID NO: 163242 - DNA, 15 bp, Homo sapiens
tcagagcatttctcc

SEQ ID NO: 163243 - DNA, 15 bp, Homo sapiens
cagagcatttctcca

SEQ ID NO: 163244 - DNA, 15 bp, Homo sapiens
agagcatttctccag

SEQ ID NO: 163245 - DNA, 15 bp, Homo sapiens
gagcatttctccaga

SEQ ID NO: 163246 - DNA, 15 bp, Homo sapiens
agcatttctccagat

SEQ ID NO: 163247 - DNA, 15 bp, Homo sapiens
gcatttctccagatt

SEQ ID NO: 163248 - DNA, 15 bp, Homo sapiens
catttctccagattt

SEQ ID NO: 163249 - DNA, 15 bp, Homo sapiens
atttctccagatttt

SEQ ID NO: 163250 - DNA, 15 bp, Homo sapiens
tttctccagattttc

SEQ ID NO: 163251 - DNA, 15 bp, Homo sapiens
ttctccagattttct

SEQ ID NO: 163252 - DNA, 15 bp, Homo sapiens
tctccagattttcta

SEQ ID NO: 163253 - DNA, 15 bp, Homo sapiens
ctccagattttctaa

SEQ ID NO: 163254 - DNA, 15 bp, Homo sapiens
tccagattttctaaa

SEQ ID NO: 163255 - DNA, 15 bp, Homo sapiens
ccagattttctaaag

SEQ ID NO: 163256 - DNA, 15 bp, Homo sapiens
cagattttctaaaga

SEQ ID NO: 163257 - DNA, 15 bp, Homo sapiens
agattttctaaagaa

SEQ ID NO: 163258 - DNA, 15 bp, Homo sapiens
gattttctaaagaat

SEQ ID NO: 163259 - DNA, 15 bp, Homo sapiens
attttctaaagaata

SEQ ID NO: 163260 - DNA, 15 bp, Homo sapiens
ttttctaaagaatag

SEQ ID NO: 163261 - DNA, 15 bp, Homo sapiens
tttctaaagaataga

SEQ ID NO: 163262 - DNA, 15 bp, Homo sapiens
ttctaaagaatagaa

SEQ ID NO: 163263 - DNA, 15 bp, Homo sapiens
tctaaagaatagaat

SEQ ID NO: 163264 - DNA, 15 bp, Homo sapiens
ctaaagaatagaatt

SEQ ID NO: 163265 - DNA, 15 bp, Homo sapiens
taaagaatagaattt

SEQ ID NO: 163266 - DNA, 15 bp, Homo sapiens
aaagaatagaatttt

SEQ ID NO: 163267 - DNA, 15 bp, Homo sapiens
aagaatagaatttta

SEQ ID NO: 163268 - DNA, 15 bp, Homo sapiens
agaatagaattttat

SEQ ID NO: 163269 - DNA, 15 bp, Homo sapiens
gaatagaattttatt

SEQ ID NO: 163270 - DNA, 15 bp, Homo sapiens
aatagaattttattg

SEQ ID NO: 163271 - DNA, 15 bp, Homo sapiens
atagaattttattgc

SEQ ID NO: 163272 - DNA, 15 bp, Homo sapiens
tagaattttattgct

SEQ ID NO: 163273 - DNA, 15 bp, Homo sapiens
agaattttattgcta

SEQ ID NO: 163274 - DNA, 15 bp, Homo sapiens
gaattttattgctac

SEQ ID NO: 163275 - DNA, 15 bp, Homo sapiens
aattttattgctaca

SEQ ID NO: 163276 - DNA, 15 bp, Homo sapiens
attttattgctacat

SEQ ID NO: 163277 - DNA, 15 bp, Homo sapiens
ttttattgctacata

SEQ ID NO: 163278 - DNA, 15 bp, Homo sapiens
tttattgctacatat

SEQ ID NO: 163279 - DNA, 15 bp, Homo sapiens
ttattgctacatatc

SEQ ID NO: 163280 - DNA, 15 bp, Homo sapiens
tattgctacatatca

SEQ ID NO: 163281 - DNA, 15 bp, Homo sapiens
attgctacatatcat

SEQ ID NO: 163282 - DNA, 15 bp, Homo sapiens
ttgctacatatcatc

SEQ ID NO: 163283 - DNA, 15 bp, Homo sapiens
tgctacatatcatca

SEQ ID NO: 163284 - DNA, 15 bp, Homo sapiens
gctacatatcatcag

SEQ ID NO: 163285 - DNA, 15 bp, Homo sapiens
ctacatatcatcagc

SEQ ID NO: 163286 - DNA, 15 bp, Homo sapiens
tacatatcatcagct

SEQ ID NO: 163287 - DNA, 15 bp, Homo sapiens
acatatcatcagcta

SEQ ID NO: 163288 - DNA, 15 bp, Homo sapiens
catatcatcagctat

SEQ ID NO: 163289 - DNA, 15 bp, Homo sapiens
atatcatcagctatg

SEQ ID NO: 163290 - DNA, 15 bp, Homo sapiens
tatcatcagctatgc

SEQ ID NO: 163291 - DNA, 15 bp, Homo sapiens
atcatcagctatgcc

SEQ ID NO: 163292 - DNA, 15 bp, Homo sapiens
tcatcagctatgcct

SEQ ID NO: 163293 - DNA, 15 bp, Homo sapiens
catcagctatgcctg

SEQ ID NO: 163294 - DNA, 15 bp, Homo sapiens
atcagctatgcctgc

SEQ ID NO: 163295 - DNA, 15 bp, Homo sapiens
tcagctatgcctgct

SEQ ID NO: 163296 - DNA, 15 bp, Homo sapiens
cagctatgcctgctg

SEQ ID NO: 163297 - DNA, 15 bp, Homo sapiens
agctatgcctgctgc

SEQ ID NO: 163298 - DNA, 15 bp, Homo sapiens
gctatgcctgctgct

SEQ ID NO: 163299 - DNA, 15 bp, Homo sapiens
ctatgcctgctgcta

SEQ ID NO: 163300 - DNA, 15 bp, Homo sapiens
tatgcctgctgctat

SEQ ID NO: 163301 - DNA, 15 bp, Homo sapiens
atgcctgctgctatt

SEQ ID NO: 163302 - DNA, 15 bp, Homo sapiens
tgcctgctgctattt

SEQ ID NO: 163303 - DNA, 15 bp, Homo sapiens
gcctgctgctattta

SEQ ID NO: 163304 - DNA, 15 bp, Homo sapiens
cctgctgctatttaa

SEQ ID NO: 163305 - DNA, 15 bp, Homo sapiens
ctgctgctatttaat

SEQ ID NO: 163306 - DNA, 15 bp, Homo sapiens
tgctgctatttaatt

SEQ ID NO: 163307 - DNA, 15 bp, Homo sapiens
gctgctatttaattg

SEQ ID NO: 163308 - DNA, 15 bp, Homo sapiens
ctgctatttaattgg

SEQ ID NO: 163309 - DNA, 15 bp, Homo sapiens
tgctatttaattggt

SEQ ID NO: 163310 - DNA, 15 bp, Homo sapiens
gctatttaattggta

SEQ ID NO: 163311 - DNA, 15 bp, Homo sapiens
ctatttaattggtat

SEQ ID NO: 163312 - DNA, 15 bp, Homo sapiens
tatttaattggtatc

SEQ ID NO: 163313 - DNA, 15 bp, Homo sapiens
atttaattggtatct

SEQ ID NO: 163314 - DNA, 15 bp, Homo sapiens
tttaattggtatctg

SEQ ID NO: 163315 - DNA, 15 bp, Homo sapiens
ttaattggtatctga

SEQ ID NO: 163316 - DNA, 15 bp, Homo sapiens
taattggtatctgaa

SEQ ID NO: 163317 - DNA, 15 bp, Homo sapiens
aattggtatctgaat

SEQ ID NO: 163318 - DNA, 15 bp, Homo sapiens
attggtatctgaatt

SEQ ID NO: 163319 - DNA, 15 bp, Homo sapiens
ttggtatctgaatta

SEQ ID NO: 163320 - DNA, 15 bp, Homo sapiens
tggtatctgaattaa

SEQ ID NO: 163321 - DNA, 15 bp, Homo sapiens
ggtatctgaattaaa

SEQ ID NO: 163322 - DNA, 15 bp, Homo sapiens
gtatctgaattaaaa

SEQ ID NO: 163323 - DNA, 15 bp, Homo sapiens
tatctgaattaaaag

SEQ ID NO: 163324 - DNA, 15 bp, Homo sapiens
atctgaattaaaagg

SEQ ID NO: 163325 - DNA, 15 bp, Homo sapiens
tctgaattaaaaggt

SEQ ID NO: 163326 - DNA, 15 bp, Homo sapiens
ctgaattaaaaggtc

SEQ ID NO: 163327 - DNA, 15 bp, Homo sapiens
tgaattaaaaggtct

SEQ ID NO: 163328 - DNA, 15 bp, Homo sapiens
gaattaaaaggtctg

SEQ ID NO: 163329 - DNA, 15 bp, Homo sapiens
aattaaaaggtctgg

SEQ ID NO: 163330 - DNA, 15 bp, Homo sapiens
attaaaaggtctggt

SEQ ID NO: 163331 - DNA, 15 bp, Homo sapiens
ttaaaaggtctggtt

SEQ ID NO: 163332 - DNA, 15 bp, Homo sapiens
taaaaggtctggttt

SEQ ID NO: 163333 - DNA, 15 bp, Homo sapiens
aaaaggtctggtttg

SEQ ID NO: 163334 - DNA, 15 bp, Homo sapiens
aaaggtctggtttgt

SEQ ID NO: 163335 - DNA, 15 bp, Homo sapiens
aaggtctggtttgtc

SEQ ID NO: 163336 - DNA, 15 bp, Homo sapiens
aggtctggtttgtcc

SEQ ID NO: 163337 - DNA, 15 bp, Homo sapiens
ggtctggtttgtccc

SEQ ID NO: 163338 - DNA, 15 bp, Homo sapiens
gtctggtttgtccct

SEQ ID NO: 163339 - DNA, 15 bp, Homo sapiens
tctggtttgtcccta

SEQ ID NO: 163340 - DNA, 15 bp, Homo sapiens
ctggtttgtccctag

SEQ ID NO: 163341 - DNA, 15 bp, Homo sapiens
tggtttgtccctaga

SEQ ID NO: 163342 - DNA, 15 bp, Homo sapiens
ggtttgtccctagag

SEQ ID NO: 163343 - DNA, 15 bp, Homo sapiens
gtttgtccctagaga

SEQ ID NO: 163344 - DNA, 15 bp, Homo sapiens
tttgtccctagagaa

SEQ ID NO: 163345 - DNA, 15 bp, Homo sapiens
ttgtccctagagaat

SEQ ID NO: 163346 - DNA, 15 bp, Homo sapiens
tgtccctagagaatc

SEQ ID NO: 163347 - DNA, 15 bp, Homo sapiens
gtccctagagaatca

SEQ ID NO: 163348 - DNA, 15 bp, Homo sapiens
tccctagagaatcaa

SEQ ID NO: 163349 - DNA, 15 bp, Homo sapiens
ccctagagaatcaaa

SEQ ID NO: 163350 - DNA, 15 bp, Homo sapiens
cctagagaatcaaat

SEQ ID NO: 163351 - DNA, 15 bp, Homo sapiens
ctagagaatcaaatt

SEQ ID NO: 163352 - DNA, 15 bp, Homo sapiens
tagagaatcaaattt

SEQ ID NO: 163353 - DNA, 15 bp, Homo sapiens
agagaatcaaatttt

SEQ ID NO: 163354 - DNA, 15 bp, Homo sapiens
gagaatcaaattttt

SEQ ID NO: 163355 - DNA, 15 bp, Homo sapiens
agaatcaaatttttt

SEQ ID NO: 163356 - DNA, 15 bp, Homo sapiens
gaatcaaattttttc

SEQ ID NO: 163357 - DNA, 15 bp, Homo sapiens
aatcaaattttttct

SEQ ID NO: 163358 - DNA, 15 bp, Homo sapiens
atcaaattttttctt

SEQ ID NO: 163359 - DNA, 15 bp, Homo sapiens
tcaaattttttcttc

SEQ ID NO: 163360 - DNA, 15 bp, Homo sapiens
caaattttttcttca

SEQ ID NO: 163361 - DNA, 15 bp, Homo sapiens
aaattttttcttcac

SEQ ID NO: 163362 - DNA, 15 bp, Homo sapiens
aattttttcttcact

SEQ ID NO: 163363 - DNA, 15 bp, Homo sapiens
attttttcttcactc

SEQ ID NO: 163364 - DNA, 15 bp, Homo sapiens
ttttttcttcactcc

SEQ ID NO: 163365 - DNA, 15 bp, Homo sapiens
tttttcttcactccc

SEQ ID NO: 163366 - DNA, 15 bp, Homo sapiens
ttttcttcactccca

SEQ ID NO: 163367 - DNA, 15 bp, Homo sapiens
tttcttcactcccat

SEQ ID NO: 163368 - DNA, 15 bp, Homo sapiens
ttcttcactcccata

SEQ ID NO: 163369 - DNA, 15 bp, Homo sapiens
tcttcactcccatat

SEQ ID NO: 163370 - DNA, 15 bp, Homo sapiens
cttcactcccatatt

SEQ ID NO: 163371 - DNA, 15 bp, Homo sapiens
ttcactcccatattt

SEQ ID NO: 163372 - DNA, 15 bp, Homo sapiens
tcactcccatatttc

SEQ ID NO: 163373 - DNA, 15 bp, Homo sapiens
cactcccatatttca

SEQ ID NO: 163374 - DNA, 15 bp, Homo sapiens
actcccatatttcag

SEQ ID NO: 163375 - DNA, 15 bp, Homo sapiens
ctcccatatttcaga

SEQ ID NO: 163376 - DNA, 15 bp, Homo sapiens
tcccatatttcagaa

SEQ ID NO: 163377 - DNA, 15 bp, Homo sapiens
cccatatttcagaac

SEQ ID NO: 163378 - DNA, 15 bp, Homo sapiens
ccatatttcagaact

SEQ ID NO: 163379 - DNA, 15 bp, Homo sapiens
catatttcagaactt

SEQ ID NO: 163380 - DNA, 15 bp, Homo sapiens
atatttcagaacttg

SEQ ID NO: 163381 - DNA, 15 bp, Homo sapiens
tatttcagaacttga

SEQ ID NO: 163382 - DNA, 15 bp, Homo sapiens
atttcagaacttgat

SEQ ID NO: 163383 - DNA, 15 bp, Homo sapiens
tttcagaacttgata

SEQ ID NO: 163384 - DNA, 15 bp, Homo sapiens
ttcagaacttgatac

SEQ ID NO: 163385 - DNA, 15 bp, Homo sapiens
tcagaacttgataca

SEQ ID NO: 163386 - DNA, 15 bp, Homo sapiens
cagaacttgatacat

SEQ ID NO: 163387 - DNA, 15 bp, Homo sapiens
agaacttgatacatt

SEQ ID NO: 163388 - DNA, 15 bp, Homo sapiens
gaacttgatacattt

SEQ ID NO: 163389 - DNA, 15 bp, Homo sapiens
aacttgatacatttt

SEQ ID NO: 163390 - DNA, 15 bp, Homo sapiens
acttgatacattttt

SEQ ID NO: 163391 - DNA, 15 bp, Homo sapiens
cttgatacattttta

SEQ ID NO: 163392 - DNA, 15 bp, Homo sapiens
ttgatacatttttag

SEQ ID NO: 163393 - DNA, 15 bp, Homo sapiens
tgatacatttttagg

SEQ ID NO: 163394 - DNA, 15 bp, Homo sapiens
gatacatttttagga

SEQ ID NO: 163395 - DNA, 15 bp, Homo sapiens
atacatttttaggat

SEQ ID NO: 163396 - DNA, 15 bp, Homo sapiens
tacatttttaggata

SEQ ID NO: 163397 - DNA, 15 bp, Homo sapiens
acatttttaggataa

SEQ ID NO: 163398 - DNA, 15 bp, Homo sapiens
catttttaggataaa

SEQ ID NO: 163399 - DNA, 15 bp, Homo sapiens
atttttaggataaac

SEQ ID NO: 163400 - DNA, 15 bp, Homo sapiens
tttttaggataaacc

SEQ ID NO: 163401 - DNA, 15 bp, Homo sapiens
ttttaggataaacca

SEQ ID NO: 163402 - DNA, 15 bp, Homo sapiens
tttaggataaaccat

SEQ ID NO: 163403 - DNA, 15 bp, Homo sapiens
ttaggataaaccatg

SEQ ID NO: 163404 - DNA, 15 bp, Homo sapiens
taggataaaccatga

SEQ ID NO: 163405 - DNA, 15 bp, Homo sapiens
aggataaaccatgaa

SEQ ID NO: 163406 - DNA, 15 bp, Homo sapiens
ggataaaccatgaat

SEQ ID NO: 163407 - DNA, 15 bp, Homo sapiens
gataaaccatgaatg

SEQ ID NO: 163408 - DNA, 15 bp, Homo sapiens
ataaaccatgaatga

SEQ ID NO: 163409 - DNA, 15 bp, Homo sapiens
taaaccatgaatgac

SEQ ID NO: 163410 - DNA, 15 bp, Homo sapiens
aaaccatgaatgaca

SEQ ID NO: 163411 - DNA, 15 bp, Homo sapiens
aaccatgaatgacac

SEQ ID NO: 163412 - DNA, 15 bp, Homo sapiens
accatgaatgacacc

SEQ ID NO: 163413 - DNA, 15 bp, Homo sapiens
ccatgaatgacaccc

SEQ ID NO: 163414 - DNA, 15 bp, Homo sapiens
catgaatgacacccg

SEQ ID NO: 163415 - DNA, 15 bp, Homo sapiens
atgaatgacacccgt

SEQ ID NO: 163416 - DNA, 15 bp, Homo sapiens
tgaatgacacccgtt

SEQ ID NO: 163417 - DNA, 15 bp, Homo sapiens
gaatgacacccgttt

SEQ ID NO: 163418 - DNA, 15 bp, Homo sapiens
aatgacacccgtttc

SEQ ID NO: 163419 - DNA, 15 bp, Homo sapiens
atgacacccgtttct

SEQ ID NO: 163420 - DNA, 15 bp, Homo sapiens
tgacacccgtttctt

SEQ ID NO: 163421 - DNA, 15 bp, Homo sapiens
gacacccgtttcttc

SEQ ID NO: 163422 - DNA, 15 bp, Homo sapiens
acacccgtttcttct

SEQ ID NO: 163423 - DNA, 15 bp, Homo sapiens
cacccgtttcttctc

SEQ ID NO: 163424 - DNA, 15 bp, Homo sapiens
acccgtttcttctcc

SEQ ID NO: 163425 - DNA, 15 bp, Homo sapiens
cccgtttcttctccc

SEQ ID NO: 163426 - DNA, 15 bp, Homo sapiens
ccgtttcttctccct

SEQ ID NO: 163427 - DNA, 15 bp, Homo sapiens
cgtttcttctccctc

SEQ ID NO: 163428 - DNA, 15 bp, Homo sapiens
gtttcttctccctca

SEQ ID NO: 163429 - DNA, 15 bp, Homo sapiens
tttcttctccctcac

SEQ ID NO: 163430 - DNA, 15 bp, Homo sapiens
ttcttctccctcacc

SEQ ID NO: 163431 - DNA, 15 bp, Homo sapiens
tcttctccctcaccc

SEQ ID NO: 163432 - DNA, 15 bp, Homo sapiens
cttctccctcaccct

SEQ ID NO: 163433 - DNA, 15 bp, Homo sapiens
ttctccctcaccctc

SEQ ID NO: 163434 - DNA, 15 bp, Homo sapiens
tctccctcaccctcc

SEQ ID NO: 163435 - DNA, 15 bp, Homo sapiens
ctccctcaccctccc

SEQ ID NO: 163436 - DNA, 15 bp, Homo sapiens
tccctcaccctccct

SEQ ID NO: 163437 - DNA, 15 bp, Homo sapiens
ccctcaccctccctt

SEQ ID NO: 163438 - DNA, 15 bp, Homo sapiens
cctcaccctcccttc

SEQ ID NO: 163439 - DNA, 15 bp, Homo sapiens
ctcaccctcccttcc

SEQ ID NO: 163440 - DNA, 15 bp, Homo sapiens
tcaccctcccttccc

SEQ ID NO: 163441 - DNA, 15 bp, Homo sapiens
caccctcccttccct

SEQ ID NO: 163442 - DNA, 15 bp, Homo sapiens
accctcccttccctc

SEQ ID NO: 163443 - DNA, 15 bp, Homo sapiens
ccctcccttccctcc

SEQ ID NO: 163444 - DNA, 15 bp, Homo sapiens
cctcccttccctccc

SEQ ID NO: 163445 - DNA, 15 bp, Homo sapiens
ctcccttccctccca

SEQ ID NO: 163446 - DNA, 15 bp, Homo sapiens
tcccttccctcccat

SEQ ID NO: 163447 - DNA, 15 bp, Homo sapiens
cccttccctcccatt

SEQ ID NO: 163448 - DNA, 15 bp, Homo sapiens
ccttccctcccattt

SEQ ID NO: 163449 - DNA, 15 bp, Homo sapiens
cttccctcccatttt

SEQ ID NO: 163450 - DNA, 15 bp, Homo sapiens
ttccctcccattttt

SEQ ID NO: 163451 - DNA, 15 bp, Homo sapiens
tccctcccatttttt

SEQ ID NO: 163452 - DNA, 15 bp, Homo sapiens
ccctcccattttttt

SEQ ID NO: 163453 - DNA, 15 bp, Homo sapiens
cctcccatttttttt

SEQ ID NO: 163454 - DNA, 15 bp, Homo sapiens
ctcccattttttttt

SEQ ID NO: 163455 - DNA, 15 bp, Homo sapiens
tcccatttttttttt

SEQ ID NO: 163456 - DNA, 15 bp, Homo sapiens
cccattttttttttt

SEQ ID NO: 163457 - DNA, 15 bp, Homo sapiens
ccatttttttttttt

SEQ ID NO: 163458 - DNA, 15 bp, Homo sapiens
tttttttttttagaa

SEQ ID NO: 163459 - DNA, 15 bp, Homo sapiens
ttttttttttagaag

SEQ ID NO: 163460 - DNA, 15 bp, Homo sapiens
tttttttttagaagc

SEQ ID NO: 163461 - DNA, 15 bp, Homo sapiens
ttttttttagaagct

SEQ ID NO: 163462 - DNA, 15 bp, Homo sapiens
tttttttagaagctg

SEQ ID NO: 163463 - DNA, 15 bp, Homo sapiens
ttttttagaagctga

SEQ ID NO: 163464 - DNA, 15 bp, Homo sapiens
tttttagaagctgaa

SEQ ID NO: 163465 - DNA, 15 bp, Homo sapiens
ttttagaagctgaat

SEQ ID NO: 163466 - DNA, 15 bp, Homo sapiens
tttagaagctgaata

SEQ ID NO: 163467 - DNA, 15 bp, Homo sapiens
ttagaagctgaataa

SEQ ID NO: 163468 - DNA, 15 bp, Homo sapiens
tagaagctgaataat

SEQ ID NO: 163469 - DNA, 15 bp, Homo sapiens
agaagctgaataata

SEQ ID NO: 163470 - DNA, 15 bp, Homo sapiens
gaagctgaataatat

SEQ ID NO: 163471 - DNA, 15 bp, Homo sapiens
aagctgaataatatc

SEQ ID NO: 163472 - DNA, 15 bp, Homo sapiens
agctgaataatatca

SEQ ID NO: 163473 - DNA, 15 bp, Homo sapiens
gctgaataatatcaa

SEQ ID NO: 163474 - DNA, 15 bp, Homo sapiens
ctgaataatatcaat

SEQ ID NO: 163475 - DNA, 15 bp, Homo sapiens
tgaataatatcaatg

SEQ ID NO: 163476 - DNA, 15 bp, Homo sapiens
gaataatatcaatga

SEQ ID NO: 163477 - DNA, 15 bp, Homo sapiens
aataatatcaatgat

SEQ ID NO: 163478 - DNA, 15 bp, Homo sapiens
ataatatcaatgata

SEQ ID NO: 163479 - DNA, 15 bp, Homo sapiens
taatatcaatgatat

SEQ ID NO: 163480 - DNA, 15 bp, Homo sapiens
aatatcaatgatatc

SEQ ID NO: 163481 - DNA, 15 bp, Homo sapiens
atatcaatgatatcc

SEQ ID NO: 163482 - DNA, 15 bp, Homo sapiens
tatcaatgatatcct

SEQ ID NO: 163483 - DNA, 15 bp, Homo sapiens
atcaatgatatcctg

SEQ ID NO: 163484 - DNA, 15 bp, Homo sapiens
tcaatgatatcctga

SEQ ID NO: 163485 - DNA, 15 bp, Homo sapiens
caatgatatcctgaa

SEQ ID NO: 163486 - DNA, 15 bp, Homo sapiens
aatgatatcctgaag

SEQ ID NO: 163487 - DNA, 15 bp, Homo sapiens
atgatatcctgaagt

SEQ ID NO: 163488 - DNA, 15 bp, Homo sapiens
tgatatcctgaagtc

SEQ ID NO: 163489 - DNA, 15 bp, Homo sapiens
gatatcctgaagtcc

SEQ ID NO: 163490 - DNA, 15 bp, Homo sapiens
atatcctgaagtccg

SEQ ID NO: 163491 - DNA, 15 bp, Homo sapiens
tatcctgaagtccgt

SEQ ID NO: 163492 - DNA, 15 bp, Homo sapiens
atcctgaagtccgtg

SEQ ID NO: 163493 - DNA, 15 bp, Homo sapiens
tcctgaagtccgtgt

SEQ ID NO: 163494 - DNA, 15 bp, Homo sapiens
cctgaagtccgtgtt

SEQ ID NO: 163495 - DNA, 15 bp, Homo sapiens
ctgaagtccgtgttc

SEQ ID NO: 163496 - DNA, 15 bp, Homo sapiens
tgaagtccgtgttct

SEQ ID NO: 163497 - DNA, 15 bp, Homo sapiens
gaagtccgtgttctt

SEQ ID NO: 163498 - DNA, 15 bp, Homo sapiens
aagtccgtgttcttg

SEQ ID NO: 163499 - DNA, 15 bp, Homo sapiens
agtccgtgttcttga

SEQ ID NO: 163500 - DNA, 15 bp, Homo sapiens
gtccgtgttcttgat

SEQ ID NO: 163501 - DNA, 15 bp, Homo sapiens
tccgtgttcttgatc

SEQ ID NO: 163502 - DNA, 15 bp, Homo sapiens
ccgtgttcttgatct

SEQ ID NO: 163503 - DNA, 15 bp, Homo sapiens
cgtgttcttgatctt

SEQ ID NO: 163504 - DNA, 15 bp, Homo sapiens
gtgttcttgatcttc

SEQ ID NO: 163505 - DNA, 15 bp, Homo sapiens
tgttcttgatcttcc

SEQ ID NO: 163506 - DNA, 15 bp, Homo sapiens
gttcttgatcttccc

SEQ ID NO: 163507 - DNA, 15 bp, Homo sapiens
ttcttgatcttccca

SEQ ID NO: 163508 - DNA, 15 bp, Homo sapiens
tcttgatcttcccac

SEQ ID NO: 163509 - DNA, 15 bp, Homo sapiens
cttgatcttcccaca

SEQ ID NO: 163510 - DNA, 15 bp, Homo sapiens
ttgatcttcccacat

SEQ ID NO: 163511 - DNA, 15 bp, Homo sapiens
tgatcttcccacatt

SEQ ID NO: 163512 - DNA, 15 bp, Homo sapiens
gatcttcccacattt

SEQ ID NO: 163513 - DNA, 15 bp, Homo sapiens
atcttcccacatttt

SEQ ID NO: 163514 - DNA, 15 bp, Homo sapiens
tcttcccacattttt

SEQ ID NO: 163515 - DNA, 15 bp, Homo sapiens
cttcccacatttttg

SEQ ID NO: 163516 - DNA, 15 bp, Homo sapiens
ttcccacatttttgc

SEQ ID NO: 163517 - DNA, 15 bp, Homo sapiens
tcccacatttttgcc

SEQ ID NO: 163518 - DNA, 15 bp, Homo sapiens
cccacatttttgcct

SEQ ID NO: 163519 - DNA, 15 bp, Homo sapiens
ccacatttttgcctg

SEQ ID NO: 163520 - DNA, 15 bp, Homo sapiens
cacatttttgcctgg

SEQ ID NO: 163521 - DNA, 15 bp, Homo sapiens
acatttttgcctggg

SEQ ID NO: 163522 - DNA, 15 bp, Homo sapiens
catttttgcctggga

SEQ ID NO: 163523 - DNA, 15 bp, Homo sapiens
atttttgcctgggac

SEQ ID NO: 163524 - DNA, 15 bp, Homo sapiens
tttttgcctgggacg

SEQ ID NO: 163525 - DNA, 15 bp, Homo sapiens
ttttgcctgggacga

SEQ ID NO: 163526 - DNA, 15 bp, Homo sapiens
tttgcctgggacgag

SEQ ID NO: 163527 - DNA, 15 bp, Homo sapiens
ttgcctgggacgagg

SEQ ID NO: 163528 - DNA, 15 bp, Homo sapiens
tgcctgggacgaggg

SEQ ID NO: 163529 - DNA, 15 bp, Homo sapiens
gcctgggacgagggc

SEQ ID NO: 163530 - DNA, 15 bp, Homo sapiens
cctgggacgagggct

SEQ ID NO: 163531 - DNA, 15 bp, Homo sapiens
ctgggacgagggctc

SEQ ID NO: 163532 - DNA, 15 bp, Homo sapiens
tgggacgagggctca

SEQ ID NO: 163533 - DNA, 15 bp, Homo sapiens
gggacgagggctcat

SEQ ID NO: 163534 - DNA, 15 bp, Homo sapiens
ggacgagggctcatc

SEQ ID NO: 163535 - DNA, 15 bp, Homo sapiens
gacgagggctcatcg

SEQ ID NO: 163536 - DNA, 15 bp, Homo sapiens
acgagggctcatcga

SEQ ID NO: 163537 - DNA, 15 bp, Homo sapiens
cgagggctcatcgac

SEQ ID NO: 163538 - DNA, 15 bp, Homo sapiens
gagggctcatcgaca

SEQ ID NO: 163539 - DNA, 15 bp, Homo sapiens
agggctcatcgacat

SEQ ID NO: 163540 - DNA, 15 bp, Homo sapiens
gggctcatcgacatg

SEQ ID NO: 163541 - DNA, 15 bp, Homo sapiens
ggctcatcgacatgg

SEQ ID NO: 163542 - DNA, 15 bp, Homo sapiens
gctcatcgacatggt

SEQ ID NO: 163543 - DNA, 15 bp, Homo sapiens
ctcatcgacatggtg

SEQ ID NO: 163544 - DNA, 15 bp, Homo sapiens
tcatcgacatggtga

SEQ ID NO: 163545 - DNA, 15 bp, Homo sapiens
catcgacatggtgaa

SEQ ID NO: 163546 - DNA, 15 bp, Homo sapiens
atcgacatggtgaaa

SEQ ID NO: 163547 - DNA, 15 bp, Homo sapiens
tcgacatggtgaaaa

SEQ ID NO: 163548 - DNA, 15 bp, Homo sapiens
cgacatggtgaaaaa

SEQ ID NO: 163549 - DNA, 15 bp, Homo sapiens
gacatggtgaaaaac

SEQ ID NO: 163550 - DNA, 15 bp, Homo sapiens
acatggtgaaaaacc

SEQ ID NO: 163551 - DNA, 15 bp, Homo sapiens
catggtgaaaaacca

SEQ ID NO: 163552 - DNA, 15 bp, Homo sapiens
atggtgaaaaaccag

SEQ ID NO: 163553 - DNA, 15 bp, Homo sapiens
tggtgaaaaaccagg

SEQ ID NO: 163554 - DNA, 15 bp, Homo sapiens
ggtgaaaaaccaggc

SEQ ID NO: 163555 - DNA, 15 bp, Homo sapiens
gtgaaaaaccaggca

SEQ ID NO: 163556 - DNA, 15 bp, Homo sapiens
tgaaaaaccaggcaa

SEQ ID NO: 163557 - DNA, 15 bp, Homo sapiens
gaaaaaccaggcaat

SEQ ID NO: 163558 - DNA, 15 bp, Homo sapiens
aaaaaccaggcaatg

SEQ ID NO: 163559 - DNA, 15 bp, Homo sapiens
aaaaccaggcaatgg

SEQ ID NO: 163560 - DNA, 15 bp, Homo sapiens
aaaccaggcaatggc

SEQ ID NO: 163561 - DNA, 15 bp, Homo sapiens
aaccaggcaatggct

SEQ ID NO: 163562 - DNA, 15 bp, Homo sapiens
accaggcaatggctg

SEQ ID NO: 163563 - DNA, 15 bp, Homo sapiens
ccaggcaatggctga

SEQ ID NO: 163564 - DNA, 15 bp, Homo sapiens
caggcaatggctgat

SEQ ID NO: 163565 - DNA, 15 bp, Homo sapiens
aggcaatggctgatg

SEQ ID NO: 163566 - DNA, 15 bp, Homo sapiens
ggcaatggctgatgc

SEQ ID NO: 163567 - DNA, 15 bp, Homo sapiens
gcaatggctgatgcc

SEQ ID NO: 163568 - DNA, 15 bp, Homo sapiens
caatggctgatgccc

SEQ ID NO: 163569 - DNA, 15 bp, Homo sapiens
aatggctgatgccct

SEQ ID NO: 163570 - DNA, 15 bp, Homo sapiens
atggctgatgccctg

SEQ ID NO: 163571 - DNA, 15 bp, Homo sapiens
tggctgatgccctgg

SEQ ID NO: 163572 - DNA, 15 bp, Homo sapiens
ggctgatgccctgga

SEQ ID NO: 163573 - DNA, 15 bp, Homo sapiens
gctgatgccctggaa

SEQ ID NO: 163574 - DNA, 15 bp, Homo sapiens
ctgatgccctggaaa

SEQ ID NO: 163575 - DNA, 15 bp, Homo sapiens
tgatgccctggaaag

SEQ ID NO: 163576 - DNA, 15 bp, Homo sapiens
gatgccctggaaagg

SEQ ID NO: 163577 - DNA, 15 bp, Homo sapiens
atgccctggaaaggt

SEQ ID NO: 163578 - DNA, 15 bp, Homo sapiens
tgccctggaaaggtt

SEQ ID NO: 163579 - DNA, 15 bp, Homo sapiens
gccctggaaaggttt

SEQ ID NO: 163580 - DNA, 15 bp, Homo sapiens
ccctggaaaggtttg

SEQ ID NO: 163581 - DNA, 15 bp, Homo sapiens
cctggaaaggtttgg

SEQ ID NO: 163582 - DNA, 15 bp, Homo sapiens
ctggaaaggtttggt

SEQ ID NO: 163583 - DNA, 15 bp, Homo sapiens
tggaaaggtttggtg

SEQ ID NO: 163584 - DNA, 15 bp, Homo sapiens
ggaaaggtttggtga

SEQ ID NO: 163585 - DNA, 15 bp, Homo sapiens
gaaaggtttggtgag

SEQ ID NO: 163586 - DNA, 15 bp, Homo sapiens
aaaggtttggtgagt

SEQ ID NO: 163587 - DNA, 15 bp, Homo sapiens
aaggtttggtgagtg

SEQ ID NO: 163588 - DNA, 15 bp, Homo sapiens
aggtttggtgagtga

SEQ ID NO: 163589 - DNA, 15 bp, Homo sapiens
ggtttggtgagtgaa

SEQ ID NO: 163590 - DNA, 15 bp, Homo sapiens
gtttggtgagtgaag

SEQ ID NO: 163591 - DNA, 15 bp, Homo sapiens
tttggtgagtgaagc

SEQ ID NO: 163592 - DNA, 15 bp, Homo sapiens
ttggtgagtgaagca

SEQ ID NO: 163593 - DNA, 15 bp, Homo sapiens
tggtgagtgaagcag

SEQ ID NO: 163594 - DNA, 15 bp, Homo sapiens
ggtgagtgaagcagt

SEQ ID NO: 163595 - DNA, 15 bp, Homo sapiens
gtgagtgaagcagtg

SEQ ID NO: 163596 - DNA, 15 bp, Homo sapiens
tgagtgaagcagtgg

SEQ ID NO: 163597 - DNA, 15 bp, Homo sapiens
gagtgaagcagtggc

SEQ ID NO: 163598 - DNA, 15 bp, Homo sapiens
agtgaagcagtggct

SEQ ID NO: 163599 - DNA, 15 bp, Homo sapiens
gtgaagcagtggctg

SEQ ID NO: 163600 - DNA, 15 bp, Homo sapiens
tgaagcagtggctgt

SEQ ID NO: 163601 - DNA, 15 bp, Homo sapiens
gaagcagtggctgta

SEQ ID NO: 163602 - DNA, 15 bp, Homo sapiens
aagcagtggctgtag

SEQ ID NO: 163603 - DNA, 15 bp, Homo sapiens
agcagtggctgtagg

SEQ ID NO: 163604 - DNA, 15 bp, Homo sapiens
gcagtggctgtagga

SEQ ID NO: 163605 - DNA, 15 bp, Homo sapiens
cagtggctgtaggat

SEQ ID NO: 163606 - DNA, 15 bp, Homo sapiens
agtggctgtaggatg

SEQ ID NO: 163607 - DNA, 15 bp, Homo sapiens
gtggctgtaggatgc

SEQ ID NO: 163608 - DNA, 15 bp, Homo sapiens
tggctgtaggatgct

SEQ ID NO: 163609 - DNA, 15 bp, Homo sapiens
ggctgtaggatgctt

SEQ ID NO: 163610 - DNA, 15 bp, Homo sapiens
gctgtaggatgcttt

SEQ ID NO: 163611 - DNA, 15 bp, Homo sapiens
ctgtaggatgcttta

SEQ ID NO: 163612 - DNA, 15 bp, Homo sapiens
tgtaggatgctttaa

SEQ ID NO: 163613 - DNA, 15 bp, Homo sapiens
gtaggatgctttaat

SEQ ID NO: 163614 - DNA, 15 bp, Homo sapiens
taggatgctttaatg

SEQ ID NO: 163615 - DNA, 15 bp, Homo sapiens
aggatgctttaatgg

SEQ ID NO: 163616 - DNA, 15 bp, Homo sapiens
ggatgctttaatgga

SEQ ID NO: 163617 - DNA, 15 bp, Homo sapiens
gatgctttaatggag

SEQ ID NO: 163618 - DNA, 15 bp, Homo sapiens
atgctttaatggaga

SEQ ID NO: 163619 - DNA, 15 bp, Homo sapiens
tgctttaatggagat

SEQ ID NO: 163620 - DNA, 15 bp, Homo sapiens
gctttaatggagatg

SEQ ID NO: 163621 - DNA, 15 bp, Homo sapiens
ctttaatggagatgg

SEQ ID NO: 163622 - DNA, 15 bp, Homo sapiens
tttaatggagatggc

SEQ ID NO: 163623 - DNA, 15 bp, Homo sapiens
ttaatggagatggca

SEQ ID NO: 163624 - DNA, 15 bp, Homo sapiens
taatggagatggcac

SEQ ID NO: 163625 - DNA, 15 bp, Homo sapiens
aatggagatggcact

SEQ ID NO: 163626 - DNA, 15 bp, Homo sapiens
atggagatggcactc

SEQ ID NO: 163627 - DNA, 15 bp, Homo sapiens
tggagatggcactct

SEQ ID NO: 163628 - DNA, 15 bp, Homo sapiens
ggagatggcactctg

SEQ ID NO: 163629 - DNA, 15 bp, Homo sapiens
gagatggcactctgc

SEQ ID NO: 163630 - DNA, 15 bp, Homo sapiens
agatggcactctgca

SEQ ID NO: 163631 - DNA, 15 bp, Homo sapiens
gatggcactctgcat

SEQ ID NO: 163632 - DNA, 15 bp, Homo sapiens
atggcactctgcata

SEQ ID NO: 163633 - DNA, 15 bp, Homo sapiens
tggcactctgcatag

SEQ ID NO: 163634 - DNA, 15 bp, Homo sapiens
ggcactctgcatagg

SEQ ID NO: 163635 - DNA, 15 bp, Homo sapiens
gcactctgcataggc

SEQ ID NO: 163636 - DNA, 15 bp, Homo sapiens
cactctgcataggcc

SEQ ID NO: 163637 - DNA, 15 bp, Homo sapiens
actctgcataggcct

SEQ ID NO: 163638 - DNA, 15 bp, Homo sapiens
ctctgcataggcctt

SEQ ID NO: 163639 - DNA, 15 bp, Homo sapiens
tctgcataggccttg

SEQ ID NO: 163640 - DNA, 15 bp, Homo sapiens
ctgcataggccttgg

SEQ ID NO: 163641 - DNA, 15 bp, Homo sapiens
tgcataggccttggt

SEQ ID NO: 163642 - DNA, 15 bp, Homo sapiens
gcataggccttggta

SEQ ID NO: 163643 - DNA, 15 bp, Homo sapiens
cataggccttggtac

SEQ ID NO: 163644 - DNA, 15 bp, Homo sapiens
ataggccttggtacc

SEQ ID NO: 163645 - DNA, 15 bp, Homo sapiens
taggccttggtaccc

SEQ ID NO: 163646 - DNA, 15 bp, Homo sapiens
aggccttggtaccct

SEQ ID NO: 163647 - DNA, 15 bp, Homo sapiens
ggccttggtaccctg

SEQ ID NO: 163648 - DNA, 15 bp, Homo sapiens
gccttggtaccctga

SEQ ID NO: 163649 - DNA, 15 bp, Homo sapiens
ccttggtaccctgaa

SEQ ID NO: 163650 - DNA, 15 bp, Homo sapiens
cttggtaccctgaac

SEQ ID NO: 163651 - DNA, 15 bp, Homo sapiens
ttggtaccctgaact

SEQ ID NO: 163652 - DNA, 15 bp, Homo sapiens
tggtaccctgaactt

SEQ ID NO: 163653 - DNA, 15 bp, Homo sapiens
ggtaccctgaacttt

SEQ ID NO: 163654 - DNA, 15 bp, Homo sapiens
gtaccctgaactttg

SEQ ID NO: 163655 - DNA, 15 bp, Homo sapiens
taccctgaactttgt

SEQ ID NO: 163656 - DNA, 15 bp, Homo sapiens
accctgaactttgtt

SEQ ID NO: 163657 - DNA, 15 bp, Homo sapiens
ccctgaactttgttt

SEQ ID NO: 163658 - DNA, 15 bp, Homo sapiens
cctgaactttgtttt

SEQ ID NO: 163659 - DNA, 15 bp, Homo sapiens
ctgaactttgttttg

SEQ ID NO: 163660 - DNA, 15 bp, Homo sapiens
tgaactttgttttgg

SEQ ID NO: 163661 - DNA, 15 bp, Homo sapiens
gaactttgttttgga

SEQ ID NO: 163662 - DNA, 15 bp, Homo sapiens
aactttgttttggaa

SEQ ID NO: 163663 - DNA, 15 bp, Homo sapiens
actttgttttggaaa

SEQ ID NO: 163664 - DNA, 15 bp, Homo sapiens
ctttgttttggaaag

SEQ ID NO: 163665 - DNA, 15 bp, Homo sapiens
tttgttttggaaaga

SEQ ID NO: 163666 - DNA, 15 bp, Homo sapiens
ttgttttggaaagaa

SEQ ID NO: 163667 - DNA, 15 bp, Homo sapiens
tgttttggaaagaag

SEQ ID NO: 163668 - DNA, 15 bp, Homo sapiens
gttttggaaagaagc

SEQ ID NO: 163669 - DNA, 15 bp, Homo sapiens
ttttggaaagaagca

SEQ ID NO: 163670 - DNA, 15 bp, Homo sapiens
tttggaaagaagcag

SEQ ID NO: 163671 - DNA, 15 bp, Homo sapiens
ttggaaagaagcagg

SEQ ID NO: 163672 - DNA, 15 bp, Homo sapiens
tggaaagaagcaggt

SEQ ID NO: 163673 - DNA, 15 bp, Homo sapiens
ggaaagaagcaggtg

SEQ ID NO: 163674 - DNA, 15 bp, Homo sapiens
gaaagaagcaggtga

SEQ ID NO: 163675 - DNA, 15 bp, Homo sapiens
aaagaagcaggtgac

SEQ ID NO: 163676 - DNA, 15 bp, Homo sapiens
aagaagcaggtgact

SEQ ID NO: 163677 - DNA, 15 bp, Homo sapiens
agaagcaggtgacta

SEQ ID NO: 163678 - DNA, 15 bp, Homo sapiens
gaagcaggtgactaa

SEQ ID NO: 163679 - DNA, 15 bp, Homo sapiens
aagcaggtgactaag

SEQ ID NO: 163680 - DNA, 15 bp, Homo sapiens
agcaggtgactaagc

SEQ ID NO: 163681 - DNA, 15 bp, Homo sapiens
gcaggtgactaagca

SEQ ID NO: 163682 - DNA, 15 bp, Homo sapiens
caggtgactaagcac

SEQ ID NO: 163683 - DNA, 15 bp, Homo sapiens
aggtgactaagcaca

SEQ ID NO: 163684 - DNA, 15 bp, Homo sapiens
ggtgactaagcacag

SEQ ID NO: 163685 - DNA, 15 bp, Homo sapiens
gtgactaagcacagg

SEQ ID NO: 163686 - DNA, 15 bp, Homo sapiens
tgactaagcacagga

SEQ ID NO: 163687 - DNA, 15 bp, Homo sapiens
gactaagcacaggat

SEQ ID NO: 163688 - DNA, 15 bp, Homo sapiens
actaagcacaggatg

SEQ ID NO: 163689 - DNA, 15 bp, Homo sapiens
ctaagcacaggatgt

SEQ ID NO: 163690 - DNA, 15 bp, Homo sapiens
taagcacaggatgtt

SEQ ID NO: 163691 - DNA, 15 bp, Homo sapiens
aagcacaggatgttc

SEQ ID NO: 163692 - DNA, 15 bp, Homo sapiens
agcacaggatgttcc

SEQ ID NO: 163693 - DNA, 15 bp, Homo sapiens
gcacaggatgttccc

SEQ ID NO: 163694 - DNA, 15 bp, Homo sapiens
cacaggatgttcccc

SEQ ID NO: 163695 - DNA, 15 bp, Homo sapiens
acaggatgttccccc

SEQ ID NO: 163696 - DNA, 15 bp, Homo sapiens
caggatgttccccca

SEQ ID NO: 163697 - DNA, 15 bp, Homo sapiens
aggatgttcccccac

SEQ ID NO: 163698 - DNA, 15 bp, Homo sapiens
ggatgttcccccacc

SEQ ID NO: 163699 - DNA, 15 bp, Homo sapiens
gatgttcccccaccc

SEQ ID NO: 163700 - DNA, 15 bp, Homo sapiens
atgttcccccacccc

SEQ ID NO: 163701 - DNA, 15 bp, Homo sapiens
tgttcccccaccccc

SEQ ID NO: 163702 - DNA, 15 bp, Homo sapiens
gttcccccaccccca

SEQ ID NO: 163703 - DNA, 15 bp, Homo sapiens
ttcccccacccccat

SEQ ID NO: 163704 - DNA, 15 bp, Homo sapiens
tcccccacccccatg

SEQ ID NO: 163705 - DNA, 15 bp, Homo sapiens
cccccacccccatgc

SEQ ID NO: 163706 - DNA, 15 bp, Homo sapiens
ccccacccccatgcc

SEQ ID NO: 163707 - DNA, 15 bp, Homo sapiens
cccacccccatgccc

SEQ ID NO: 163708 - DNA, 15 bp, Homo sapiens
ccacccccatgccca

SEQ ID NO: 163709 - DNA, 15 bp, Homo sapiens
cacccccatgcccag

SEQ ID NO: 163710 - DNA, 15 bp, Homo sapiens
acccccatgcccagt

SEQ ID NO: 163711 - DNA, 15 bp, Homo sapiens
cccccatgcccagtg

SEQ ID NO: 163712 - DNA, 15 bp, Homo sapiens
ccccatgcccagtga

SEQ ID NO: 163713 - DNA, 15 bp, Homo sapiens
cccatgcccagtgac

SEQ ID NO: 163714 - DNA, 15 bp, Homo sapiens
ccatgcccagtgaca

SEQ ID NO: 163715 - DNA, 15 bp, Homo sapiens
catgcccagtgacag

SEQ ID NO: 163716 - DNA, 15 bp, Homo sapiens
atgcccagtgacagg

SEQ ID NO: 163717 - DNA, 15 bp, Homo sapiens
tgcccagtgacaggg

SEQ ID NO: 163718 - DNA, 15 bp, Homo sapiens
gcccagtgacagggc

SEQ ID NO: 163719 - DNA, 15 bp, Homo sapiens
cccagtgacagggct

SEQ ID NO: 163720 - DNA, 15 bp, Homo sapiens
ccagtgacagggctc

SEQ ID NO: 163721 - DNA, 15 bp, Homo sapiens
cagtgacagggctca

SEQ ID NO: 163722 - DNA, 15 bp, Homo sapiens
agtgacagggctcat

SEQ ID NO: 163723 - DNA, 15 bp, Homo sapiens
gtgacagggctcatg

SEQ ID NO: 163724 - DNA, 15 bp, Homo sapiens
tgacagggctcatgc

SEQ ID NO: 163725 - DNA, 15 bp, Homo sapiens
gacagggctcatgcc

SEQ ID NO: 163726 - DNA, 15 bp, Homo sapiens
acagggctcatgcca

SEQ ID NO: 163727 - DNA, 15 bp, Homo sapiens
cagggctcatgccaa

SEQ ID NO: 163728 - DNA, 15 bp, Homo sapiens
agggctcatgccaac

SEQ ID NO: 163729 - DNA, 15 bp, Homo sapiens
gggctcatgccaaca

SEQ ID NO: 163730 - DNA, 15 bp, Homo sapiens
ggctcatgccaacac

SEQ ID NO: 163731 - DNA, 15 bp, Homo sapiens
gctcatgccaacaca

SEQ ID NO: 163732 - DNA, 15 bp, Homo sapiens
ctcatgccaacacag

SEQ ID NO: 163733 - DNA, 15 bp, Homo sapiens
tcatgccaacacagc

SEQ ID NO: 163734 - DNA, 15 bp, Homo sapiens
catgccaacacagct

SEQ ID NO: 163735 - DNA, 15 bp, Homo sapiens
atgccaacacagctg

SEQ ID NO: 163736 - DNA, 15 bp, Homo sapiens
tgccaacacagctgg

SEQ ID NO: 163737 - DNA, 15 bp, Homo sapiens
gccaacacagctggt

SEQ ID NO: 163738 - DNA, 15 bp, Homo sapiens
ccaacacagctggtt

SEQ ID NO: 163739 - DNA, 15 bp, Homo sapiens
caacacagctggttg

SEQ ID NO: 163740 - DNA, 15 bp, Homo sapiens
aacacagctggttgt

SEQ ID NO: 163741 - DNA, 15 bp, Homo sapiens
acacagctggttgtg

SEQ ID NO: 163742 - DNA, 15 bp, Homo sapiens
cacagctggttgtgg

SEQ ID NO: 163743 - DNA, 15 bp, Homo sapiens
acagctggttgtggc

SEQ ID NO: 163744 - DNA, 15 bp, Homo sapiens
cagctggttgtggca

SEQ ID NO: 163745 - DNA, 15 bp, Homo sapiens
agctggttgtggcat

SEQ ID NO: 163746 - DNA, 15 bp, Homo sapiens
gctggttgtggcatg

SEQ ID NO: 163747 - DNA, 15 bp, Homo sapiens
ctggttgtggcatgg

SEQ ID NO: 163748 - DNA, 15 bp, Homo sapiens
tggttgtggcatggg

SEQ ID NO: 163749 - DNA, 15 bp, Homo sapiens
ggttgtggcatgggt

SEQ ID NO: 163750 - DNA, 15 bp, Homo sapiens
gttgtggcatgggtt

SEQ ID NO: 163751 - DNA, 15 bp, Homo sapiens
ttgtggcatgggttt

SEQ ID NO: 163752 - DNA, 15 bp, Homo sapiens
tgtggcatgggtttt

SEQ ID NO: 163753 - DNA, 15 bp, Homo sapiens
gtggcatgggttttg

SEQ ID NO: 163754 - DNA, 15 bp, Homo sapiens
tggcatgggttttgt

SEQ ID NO: 163755 - DNA, 15 bp, Homo sapiens
ggcatgggttttgtg

SEQ ID NO: 163756 - DNA, 15 bp, Homo sapiens
gcatgggttttgtga

SEQ ID NO: 163757 - DNA, 15 bp, Homo sapiens
catgggttttgtgac

SEQ ID NO: 163758 - DNA, 15 bp, Homo sapiens
atgggttttgtgaca

SEQ ID NO: 163759 - DNA, 15 bp, Homo sapiens
tgggttttgtgacac

SEQ ID NO: 163760 - DNA, 15 bp, Homo sapiens
gggttttgtgacaca

SEQ ID NO: 163761 - DNA, 15 bp, Homo sapiens
ggttttgtgacacaa

SEQ ID NO: 163762 - DNA, 15 bp, Homo sapiens
gttttgtgacacaac

SEQ ID NO: 163763 - DNA, 15 bp, Homo sapiens
ttttgtgacacaacc

SEQ ID NO: 163764 - DNA, 15 bp, Homo sapiens
tttgtgacacaacca

SEQ ID NO: 163765 - DNA, 15 bp, Homo sapiens
ttgtgacacaaccat

SEQ ID NO: 163766 - DNA, 15 bp, Homo sapiens
tgtgacacaaccatt

SEQ ID NO: 163767 - DNA, 15 bp, Homo sapiens
gtgacacaaccattt

SEQ ID NO: 163768 - DNA, 15 bp, Homo sapiens
tgacacaaccatttg

SEQ ID NO: 163769 - DNA, 15 bp, Homo sapiens
gacacaaccatttgt

SEQ ID NO: 163770 - DNA, 15 bp, Homo sapiens
acacaaccatttgtc

SEQ ID NO: 163771 - DNA, 15 bp, Homo sapiens
cacaaccatttgtct

SEQ ID NO: 163772 - DNA, 15 bp, Homo sapiens
acaaccatttgtctg

SEQ ID NO: 163773 - DNA, 15 bp, Homo sapiens
caaccatttgtctgt

SEQ ID NO: 163774 - DNA, 15 bp, Homo sapiens
aaccatttgtctgtg

SEQ ID NO: 163775 - DNA, 15 bp, Homo sapiens
accatttgtctgtgt

SEQ ID NO: 163776 - DNA, 15 bp, Homo sapiens
ccatttgtctgtgtc

SEQ ID NO: 163777 - DNA, 15 bp, Homo sapiens
catttgtctgtgtct

SEQ ID NO: 163778 - DNA, 15 bp, Homo sapiens
atttgtctgtgtctc

SEQ ID NO: 163779 - DNA, 15 bp, Homo sapiens
tttgtctgtgtctct

SEQ ID NO: 163780 - DNA, 15 bp, Homo sapiens
ttgtctgtgtctctg

SEQ ID NO: 163781 - DNA, 15 bp, Homo sapiens
tgtctgtgtctctga

SEQ ID NO: 163782 - DNA, 15 bp, Homo sapiens
gtctgtgtctctgat

SEQ ID NO: 163783 - DNA, 15 bp, Homo sapiens
tctgtgtctctgata

SEQ ID NO: 163784 - DNA, 15 bp, Homo sapiens
ctgtgtctctgatag

SEQ ID NO: 163785 - DNA, 15 bp, Homo sapiens
tgtgtctctgatagc

SEQ ID NO: 163786 - DNA, 15 bp, Homo sapiens
gtgtctctgatagca

SEQ ID NO: 163787 - DNA, 15 bp, Homo sapiens
tgtctctgatagcat

SEQ ID NO: 163788 - DNA, 15 bp, Homo sapiens
gtctctgatagcatt

SEQ ID NO: 163789 - DNA, 15 bp, Homo sapiens
tctctgatagcattg

SEQ ID NO: 163790 - DNA, 15 bp, Homo sapiens
ctctgatagcattga

SEQ ID NO: 163791 - DNA, 15 bp, Homo sapiens
tctgatagcattgag

SEQ ID NO: 163792 - DNA, 15 bp, Homo sapiens
ctgatagcattgaga

SEQ ID NO: 163793 - DNA, 15 bp, Homo sapiens
tgatagcattgagaa

SEQ ID NO: 163794 - DNA, 15 bp, Homo sapiens
gatagcattgagaaa

SEQ ID NO: 163795 - DNA, 15 bp, Homo sapiens
atagcattgagaaaa

SEQ ID NO: 163796 - DNA, 15 bp, Homo sapiens
tagcattgagaaaag

SEQ ID NO: 163797 - DNA, 15 bp, Homo sapiens
agcattgagaaaagt

SEQ ID NO: 163798 - DNA, 15 bp, Homo sapiens
gcattgagaaaagtg

SEQ ID NO: 163799 - DNA, 15 bp, Homo sapiens
cattgagaaaagtga

SEQ ID NO: 163800 - DNA, 15 bp, Homo sapiens
attgagaaaagtgaa

SEQ ID NO: 163801 - DNA, 15 bp, Homo sapiens
ttgagaaaagtgaaa

SEQ ID NO: 163802 - DNA, 15 bp, Homo sapiens
tgagaaaagtgaaag

SEQ ID NO: 163803 - DNA, 15 bp, Homo sapiens
gagaaaagtgaaagg

SEQ ID NO: 163804 - DNA, 15 bp, Homo sapiens
agaaaagtgaaaggg

SEQ ID NO: 163805 - DNA, 15 bp, Homo sapiens
gaaaagtgaaagggc

SEQ ID NO: 163806 - DNA, 15 bp, Homo sapiens
aaaagtgaaagggca

SEQ ID NO: 163807 - DNA, 15 bp, Homo sapiens
aaagtgaaagggcag

SEQ ID NO: 163808 - DNA, 15 bp, Homo sapiens
aagtgaaagggcagt

SEQ ID NO: 163809 - DNA, 15 bp, Homo sapiens
agtgaaagggcagtt

SEQ ID NO: 163810 - DNA, 15 bp, Homo sapiens
gtgaaagggcagttt

SEQ ID NO: 163811 - DNA, 15 bp, Homo sapiens
tgaaagggcagtttt

SEQ ID NO: 163812 - DNA, 15 bp, Homo sapiens
gaaagggcagttttg

SEQ ID NO: 163813 - DNA, 15 bp, Homo sapiens
aaagggcagttttga

SEQ ID NO: 163814 - DNA, 15 bp, Homo sapiens
aagggcagttttgaa

SEQ ID NO: 163815 - DNA, 15 bp, Homo sapiens
agggcagttttgaag

SEQ ID NO: 163816 - DNA, 15 bp, Homo sapiens
gggcagttttgaagg

SEQ ID NO: 163817 - DNA, 15 bp, Homo sapiens
ggcagttttgaaggt

SEQ ID NO: 163818 - DNA, 15 bp, Homo sapiens
gcagttttgaaggta

SEQ ID NO: 163819 - DNA, 15 bp, Homo sapiens
cagttttgaaggtaa

SEQ ID NO: 163820 - DNA, 15 bp, Homo sapiens
agttttgaaggtaag

SEQ ID NO: 163821 - DNA, 15 bp, Homo sapiens
gttttgaaggtaagg

SEQ ID NO: 163822 - DNA, 15 bp, Homo sapiens
ttttgaaggtaagga

SEQ ID NO: 163823 - DNA, 15 bp, Homo sapiens
tttgaaggtaaggaa

SEQ ID NO: 163824 - DNA, 15 bp, Homo sapiens
ttgaaggtaaggaaa

SEQ ID NO: 163825 - DNA, 15 bp, Homo sapiens
tgaaggtaaggaaaa

SEQ ID NO: 163826 - DNA, 15 bp, Homo sapiens
gaaggtaaggaaaat

SEQ ID NO: 163827 - DNA, 15 bp, Homo sapiens
aaggtaaggaaaata

SEQ ID NO: 163828 - DNA, 15 bp, Homo sapiens
aggtaaggaaaatag

SEQ ID NO: 163829 - DNA, 15 bp, Homo sapiens
ggtaaggaaaatagt

SEQ ID NO: 163830 - DNA, 15 bp, Homo sapiens
gtaaggaaaatagtg

SEQ ID NO: 163831 - DNA, 15 bp, Homo sapiens
taaggaaaatagtgg

SEQ ID NO: 163832 - DNA, 15 bp, Homo sapiens
aaggaaaatagtggc

SEQ ID NO: 163833 - DNA, 15 bp, Homo sapiens
aggaaaatagtggca

SEQ ID NO: 163834 - DNA, 15 bp, Homo sapiens
ggaaaatagtggcat

SEQ ID NO: 163835 - DNA, 15 bp, Homo sapiens
gaaaatagtggcatt

SEQ ID NO: 163836 - DNA, 15 bp, Homo sapiens
aaaatagtggcattt

SEQ ID NO: 163837 - DNA, 15 bp, Homo sapiens
aaatagtggcatttg

SEQ ID NO: 163838 - DNA, 15 bp, Homo sapiens
aatagtggcatttgc

SEQ ID NO: 163839 - DNA, 15 bp, Homo sapiens
atagtggcatttgct

SEQ ID NO: 163840 - DNA, 15 bp, Homo sapiens
tagtggcatttgctt

SEQ ID NO: 163841 - DNA, 15 bp, Homo sapiens
agtggcatttgcttg

SEQ ID NO: 163842 - DNA, 15 bp, Homo sapiens
gtggcatttgcttgg

SEQ ID NO: 163843 - DNA, 15 bp, Homo sapiens
tggcatttgcttgga

SEQ ID NO: 163844 - DNA, 15 bp, Homo sapiens
ggcatttgcttggat

SEQ ID NO: 163845 - DNA, 15 bp, Homo sapiens
gcatttgcttggatc

SEQ ID NO: 163846 - DNA, 15 bp, Homo sapiens
catttgcttggatcc

SEQ ID NO: 163847 - DNA, 15 bp, Homo sapiens
atttgcttggatcca

SEQ ID NO: 163848 - DNA, 15 bp, Homo sapiens
tttgcttggatccac

SEQ ID NO: 163849 - DNA, 15 bp, Homo sapiens
ttgcttggatccact

SEQ ID NO: 163850 - DNA, 15 bp, Homo sapiens
tgcttggatccactg

SEQ ID NO: 163851 - DNA, 15 bp, Homo sapiens
gcttggatccactgg

SEQ ID NO: 163852 - DNA, 15 bp, Homo sapiens
cttggatccactggc

SEQ ID NO: 163853 - DNA, 15 bp, Homo sapiens
ttggatccactggct

SEQ ID NO: 163854 - DNA, 15 bp, Homo sapiens
tggatccactggctc

SEQ ID NO: 163855 - DNA, 15 bp, Homo sapiens
ggatccactggctca

SEQ ID NO: 163856 - DNA, 15 bp, Homo sapiens
gatccactggctcat

SEQ ID NO: 163857 - DNA, 15 bp, Homo sapiens
atccactggctcatg

SEQ ID NO: 163858 - DNA, 15 bp, Homo sapiens
tccactggctcatgc

SEQ ID NO: 163859 - DNA, 15 bp, Homo sapiens
ccactggctcatgcc

SEQ ID NO: 163860 - DNA, 15 bp, Homo sapiens
cactggctcatgcca

SEQ ID NO: 163861 - DNA, 15 bp, Homo sapiens
actggctcatgccac

SEQ ID NO: 163862 - DNA, 15 bp, Homo sapiens
ctggctcatgccact

SEQ ID NO: 163863 - DNA, 15 bp, Homo sapiens
tggctcatgccactg

SEQ ID NO: 163864 - DNA, 15 bp, Homo sapiens
ggctcatgccactgt

SEQ ID NO: 163865 - DNA, 15 bp, Homo sapiens
gctcatgccactgtc

SEQ ID NO: 163866 - DNA, 15 bp, Homo sapiens
ctcatgccactgtct

SEQ ID NO: 163867 - DNA, 15 bp, Homo sapiens
tcatgccactgtctg

SEQ ID NO: 163868 - DNA, 15 bp, Homo sapiens
catgccactgtctgg

SEQ ID NO: 163869 - DNA, 15 bp, Homo sapiens
atgccactgtctggg

SEQ ID NO: 163870 - DNA, 15 bp, Homo sapiens
tgccactgtctgggt

SEQ ID NO: 163871 - DNA, 15 bp, Homo sapiens
gccactgtctgggtt

SEQ ID NO: 163872 - DNA, 15 bp, Homo sapiens
ccactgtctgggttg

SEQ ID NO: 163873 - DNA, 15 bp, Homo sapiens
cactgtctgggttgg

SEQ ID NO: 163874 - DNA, 15 bp, Homo sapiens
actgtctgggttggt

SEQ ID NO: 163875 - DNA, 15 bp, Homo sapiens
ctgtctgggttggtt

SEQ ID NO: 163876 - DNA, 15 bp, Homo sapiens
tgtctgggttggtta

SEQ ID NO: 163877 - DNA, 15 bp, Homo sapiens
gtctgggttggttag

SEQ ID NO: 163878 - DNA, 15 bp, Homo sapiens
tctgggttggttaga

SEQ ID NO: 163879 - DNA, 15 bp, Homo sapiens
ctgggttggttagaa

SEQ ID NO: 163880 - DNA, 15 bp, Homo sapiens
tgggttggttagaag

SEQ ID NO: 163881 - DNA, 15 bp, Homo sapiens
gggttggttagaagc

SEQ ID NO: 163882 - DNA, 15 bp, Homo sapiens
ggttggttagaagca

SEQ ID NO: 163883 - DNA, 15 bp, Homo sapiens
gttggttagaagcac

SEQ ID NO: 163884 - DNA, 15 bp, Homo sapiens
ttggttagaagcact

SEQ ID NO: 163885 - DNA, 15 bp, Homo sapiens
tggttagaagcactg

SEQ ID NO: 163886 - DNA, 15 bp, Homo sapiens
ggttagaagcactgg

SEQ ID NO: 163887 - DNA, 15 bp, Homo sapiens
gttagaagcactgga

SEQ ID NO: 163888 - DNA, 15 bp, Homo sapiens
ttagaagcactggaa

SEQ ID NO: 163889 - DNA, 15 bp, Homo sapiens
tagaagcactggaaa

SEQ ID NO: 163890 - DNA, 15 bp, Homo sapiens
agaagcactggaaaa

SEQ ID NO: 163891 - DNA, 15 bp, Homo sapiens
gaagcactggaaaag

SEQ ID NO: 163892 - DNA, 15 bp, Homo sapiens
aagcactggaaaagt

SEQ ID NO: 163893 - DNA, 15 bp, Homo sapiens
agcactggaaaagtc

SEQ ID NO: 163894 - DNA, 15 bp, Homo sapiens
gcactggaaaagtca

SEQ ID NO: 163895 - DNA, 15 bp, Homo sapiens
cactggaaaagtcaa

SEQ ID NO: 163896 - DNA, 15 bp, Homo sapiens
actggaaaagtcaaa

SEQ ID NO: 163897 - DNA, 15 bp, Homo sapiens
ctggaaaagtcaaac

SEQ ID NO: 163898 - DNA, 15 bp, Homo sapiens
tggaaaagtcaaacc

SEQ ID NO: 163899 - DNA, 15 bp, Homo sapiens
ggaaaagtcaaacca

SEQ ID NO: 163900 - DNA, 15 bp, Homo sapiens
gaaaagtcaaaccat

SEQ ID NO: 163901 - DNA, 15 bp, Homo sapiens
aaaagtcaaaccata

SEQ ID NO: 163902 - DNA, 15 bp, Homo sapiens
aaagtcaaaccataa

SEQ ID NO: 163903 - DNA, 15 bp, Homo sapiens
aagtcaaaccataac

SEQ ID NO: 163904 - DNA, 15 bp, Homo sapiens
agtcaaaccataact

SEQ ID NO: 163905 - DNA, 15 bp, Homo sapiens
gtcaaaccataactt

SEQ ID NO: 163906 - DNA, 15 bp, Homo sapiens
tcaaaccataacttt

SEQ ID NO: 163907 - DNA, 15 bp, Homo sapiens
caaaccataactttg

SEQ ID NO: 163908 - DNA, 15 bp, Homo sapiens
aaccataactttgag

SEQ ID NO: 163909 - DNA, 15 bp, Homo sapiens
accataactttgaga

SEQ ID NO: 163910 - DNA, 15 bp, Homo sapiens
ccataactttgagaa

SEQ ID NO: 163911 - DNA, 15 bp, Homo sapiens
cataactttgagaat

SEQ ID NO: 163912 - DNA, 15 bp, Homo sapiens
ataactttgagaatt

SEQ ID NO: 163913 - DNA, 15 bp, Homo sapiens
taactttgagaatta

SEQ ID NO: 163914 - DNA, 15 bp, Homo sapiens
aactttgagaattag

SEQ ID NO: 163915 - DNA, 15 bp, Homo sapiens
actttgagaattagg

SEQ ID NO: 163916 - DNA, 15 bp, Homo sapiens
ctttgagaattaggt

SEQ ID NO: 163917 - DNA, 15 bp, Homo sapiens
tttgagaattaggtg

SEQ ID NO: 163918 - DNA, 15 bp, Homo sapiens
ttgagaattaggtga

SEQ ID NO: 163919 - DNA, 15 bp, Homo sapiens
tgagaattaggtgat

SEQ ID NO: 163920 - DNA, 15 bp, Homo sapiens
gagaattaggtgatc

SEQ ID NO: 163921 - DNA, 15 bp, Homo sapiens
agaattaggtgatca

SEQ ID NO: 163922 - DNA, 15 bp, Homo sapiens
gaattaggtgatcag

SEQ ID NO: 163923 - DNA, 15 bp, Homo sapiens
aattaggtgatcagg

SEQ ID NO: 163924 - DNA, 15 bp, Homo sapiens
attaggtgatcaggg

SEQ ID NO: 163925 - DNA, 15 bp, Homo sapiens
ttaggtgatcaggga

SEQ ID NO: 163926 - DNA, 15 bp, Homo sapiens
taggtgatcagggaa

SEQ ID NO: 163927 - DNA, 15 bp, Homo sapiens
aggtgatcagggaat

SEQ ID NO: 163928 - DNA, 15 bp, Homo sapiens
ggtgatcagggaatc

SEQ ID NO: 163929 - DNA, 15 bp, Homo sapiens
gtgatcagggaatca

SEQ ID NO: 163930 - DNA, 15 bp, Homo sapiens
tgatcagggaatcag

SEQ ID NO: 163931 - DNA, 15 bp, Homo sapiens
gatcagggaatcaga

SEQ ID NO: 163932 - DNA, 15 bp, Homo sapiens
atcagggaatcagaa

SEQ ID NO: 163933 - DNA, 15 bp, Homo sapiens
tcagggaatcagaag

SEQ ID NO: 163934 - DNA, 15 bp, Homo sapiens
cagggaatcagaagg

SEQ ID NO: 163935 - DNA, 15 bp, Homo sapiens
agggaatcagaagga

SEQ ID NO: 163936 - DNA, 15 bp, Homo sapiens
gggaatcagaaggaa

SEQ ID NO: 163937 - DNA, 15 bp, Homo sapiens
ggaatcagaaggaaa

SEQ ID NO: 163938 - DNA, 15 bp, Homo sapiens
gaatcagaaggaaag

SEQ ID NO: 163939 - DNA, 15 bp, Homo sapiens
aatcagaaggaaaga

SEQ ID NO: 163940 - DNA, 15 bp, Homo sapiens
atcagaaggaaagat

SEQ ID NO: 163941 - DNA, 15 bp, Homo sapiens
tcagaaggaaagatg

SEQ ID NO: 163942 - DNA, 15 bp, Homo sapiens
cagaaggaaagatgc

SEQ ID NO: 163943 - DNA, 15 bp, Homo sapiens
agaaggaaagatgca

SEQ ID NO: 163944 - DNA, 15 bp, Homo sapiens
gaaggaaagatgcaa

SEQ ID NO: 163945 - DNA, 15 bp, Homo sapiens
aaggaaagatgcaaa

SEQ ID NO: 163946 - DNA, 15 bp, Homo sapiens
aggaaagatgcaaac

SEQ ID NO: 163947 - DNA, 15 bp, Homo sapiens
ggaaagatgcaaact

SEQ ID NO: 163948 - DNA, 15 bp, Homo sapiens
gaaagatgcaaactt

SEQ ID NO: 163949 - DNA, 15 bp, Homo sapiens
aaagatgcaaacttt

SEQ ID NO: 163950 - DNA, 15 bp, Homo sapiens
aagatgcaaactttg

SEQ ID NO: 163951 - DNA, 15 bp, Homo sapiens
agatgcaaactttgg

SEQ ID NO: 163952 - DNA, 15 bp, Homo sapiens
gatgcaaactttggc

SEQ ID NO: 163953 - DNA, 15 bp, Homo sapiens
atgcaaactttggct

SEQ ID NO: 163954 - DNA, 15 bp, Homo sapiens
tgcaaactttggctc

SEQ ID NO: 163955 - DNA, 15 bp, Homo sapiens
gcaaactttggctct

SEQ ID NO: 163956 - DNA, 15 bp, Homo sapiens
caaactttggctctt

SEQ ID NO: 163957 - DNA, 15 bp, Homo sapiens
aaactttggctcttt

SEQ ID NO: 163958 - DNA, 15 bp, Homo sapiens
aactttggctctttt

SEQ ID NO: 163959 - DNA, 15 bp, Homo sapiens
actttggctctttta

SEQ ID NO: 163960 - DNA, 15 bp, Homo sapiens
ctttggctcttttag

SEQ ID NO: 163961 - DNA, 15 bp, Homo sapiens
tttggctcttttagg

SEQ ID NO: 163962 - DNA, 15 bp, Homo sapiens
ttggctcttttaggc

SEQ ID NO: 163963 - DNA, 15 bp, Homo sapiens
tggctcttttaggcg

SEQ ID NO: 163964 - DNA, 15 bp, Homo sapiens
ggctcttttaggcga

SEQ ID NO: 163965 - DNA, 15 bp, Homo sapiens
gctcttttaggcgaa

SEQ ID NO: 163966 - DNA, 15 bp, Homo sapiens
ctcttttaggcgaat

SEQ ID NO: 163967 - DNA, 15 bp, Homo sapiens
tcttttaggcgaatc

SEQ ID NO: 163968 - DNA, 15 bp, Homo sapiens
cttttaggcgaatca

SEQ ID NO: 163969 - DNA, 15 bp, Homo sapiens
ttttaggcgaatcat

SEQ ID NO: 163970 - DNA, 15 bp, Homo sapiens
tttaggcgaatcatg

SEQ ID NO: 163971 - DNA, 15 bp, Homo sapiens
ttaggcgaatcatgt

SEQ ID NO: 163972 - DNA, 15 bp, Homo sapiens
taggcgaatcatgtg

SEQ ID NO: 163973 - DNA, 15 bp, Homo sapiens
aggcgaatcatgtgc

SEQ ID NO: 163974 - DNA, 15 bp, Homo sapiens
ggcgaatcatgtgcc

SEQ ID NO: 163975 - DNA, 15 bp, Homo sapiens
gcgaatcatgtgcct

SEQ ID NO: 163976 - DNA, 15 bp, Homo sapiens
cgaatcatgtgcctg

SEQ ID NO: 163977 - DNA, 15 bp, Homo sapiens
gaatcatgtgcctgc

SEQ ID NO: 163978 - DNA, 15 bp, Homo sapiens
aatcatgtgcctgca

SEQ ID NO: 163979 - DNA, 15 bp, Homo sapiens
atcatgtgcctgcag

SEQ ID NO: 163980 - DNA, 15 bp, Homo sapiens
tcatgtgcctgcaga

SEQ ID NO: 163981 - DNA, 15 bp, Homo sapiens
catgtgcctgcagat

SEQ ID NO: 163982 - DNA, 15 bp, Homo sapiens
atgtgcctgcagatg

SEQ ID NO: 163983 - DNA, 15 bp, Homo sapiens
tgtgcctgcagatga

SEQ ID NO: 163984 - DNA, 15 bp, Homo sapiens
gtgcctgcagatgag

SEQ ID NO: 163985 - DNA, 15 bp, Homo sapiens
tgcctgcagatgagg

SEQ ID NO: 163986 - DNA, 15 bp, Homo sapiens
gcctgcagatgaggt

SEQ ID NO: 163987 - DNA, 15 bp, Homo sapiens
cctgcagatgaggtc

SEQ ID NO: 163988 - DNA, 15 bp, Homo sapiens
ctgcagatgaggtca

SEQ ID NO: 163989 - DNA, 15 bp, Homo sapiens
tgcagatgaggtcat

SEQ ID NO: 163990 - DNA, 15 bp, Homo sapiens
gcagatgaggtcatt

SEQ ID NO: 163991 - DNA, 15 bp, Homo sapiens
cagatgaggtcattt

SEQ ID NO: 163992 - DNA, 15 bp, Homo sapiens
agatgaggtcattta

SEQ ID NO: 163993 - DNA, 15 bp, Homo sapiens
gatgaggtcatttat

SEQ ID NO: 163994 - DNA, 15 bp, Homo sapiens
atgaggtcatttatt

SEQ ID NO: 163995 - DNA, 15 bp, Homo sapiens
tgaggtcatttatta

SEQ ID NO: 163996 - DNA, 15 bp, Homo sapiens
gaggtcatttattat

SEQ ID NO: 163997 - DNA, 15 bp, Homo sapiens
aggtcatttattatc

SEQ ID NO: 163998 - DNA, 15 bp, Homo sapiens
ggtcatttattatct

SEQ ID NO: 163999 - DNA, 15 bp, Homo sapiens
gtcatttattatctt

SEQ ID NO: 164000 - DNA, 15 bp, Homo sapiens
tcatttattatcttt

SEQ ID NO: 164001 - DNA, 15 bp, Homo sapiens
catttattatctttt

SEQ ID NO: 164002 - DNA, 15 bp, Homo sapiens
atttattatctttta

SEQ ID NO: 164003 - DNA, 15 bp, Homo sapiens
tttattatcttttac

SEQ ID NO: 164004 - DNA, 15 bp, Homo sapiens
ttattatcttttaca

SEQ ID NO: 164005 - DNA, 15 bp, Homo sapiens
tattatcttttacac

SEQ ID NO: 164006 - DNA, 15 bp, Homo sapiens
attatcttttacaca

SEQ ID NO: 164007 - DNA, 15 bp, Homo sapiens
ttatcttttacacag

SEQ ID NO: 164008 - DNA, 15 bp, Homo sapiens
tatcttttacacagt

SEQ ID NO: 164009 - DNA, 15 bp, Homo sapiens
atcttttacacagtc

SEQ ID NO: 164010 - DNA, 15 bp, Homo sapiens
tcttttacacagtct

SEQ ID NO: 164011 - DNA, 15 bp, Homo sapiens
cttttacacagtcta

SEQ ID NO: 164012 - DNA, 15 bp, Homo sapiens
ttttacacagtctat

SEQ ID NO: 164013 - DNA, 15 bp, Homo sapiens
tttacacagtctata

SEQ ID NO: 164014 - DNA, 15 bp, Homo sapiens
ttacacagtctataa

SEQ ID NO: 164015 - DNA, 15 bp, Homo sapiens
tacacagtctataaa

SEQ ID NO: 164016 - DNA, 15 bp, Homo sapiens
acacagtctataaaa

SEQ ID NO: 164017 - DNA, 15 bp, Homo sapiens
cacagtctataaaat

SEQ ID NO: 164018 - DNA, 15 bp, Homo sapiens
acagtctataaaatt

SEQ ID NO: 164019 - DNA, 15 bp, Homo sapiens
cagtctataaaatta

SEQ ID NO: 164020 - DNA, 15 bp, Homo sapiens
agtctataaaattat

SEQ ID NO: 164021 - DNA, 15 bp, Homo sapiens
gtctataaaattata

SEQ ID NO: 164022 - DNA, 15 bp, Homo sapiens
tctataaaattataa

SEQ ID NO: 164023 - DNA, 15 bp, Homo sapiens
ctataaaattataat

SEQ ID NO: 164024 - DNA, 15 bp, Homo sapiens
tataaaattataatg

SEQ ID NO: 164025 - DNA, 15 bp, Homo sapiens
ataaaattataatgt

SEQ ID NO: 164026 - DNA, 15 bp, Homo sapiens
taaaattataatgta

SEQ ID NO: 164027 - DNA, 15 bp, Homo sapiens
aaaattataatgtat

SEQ ID NO: 164028 - DNA, 15 bp, Homo sapiens
aaattataatgtatt

SEQ ID NO: 164029 - DNA, 15 bp, Homo sapiens
aattataatgtatta

SEQ ID NO: 164030 - DNA, 15 bp, Homo sapiens
attataatgtattac

SEQ ID NO: 164031 - DNA, 15 bp, Homo sapiens
ttataatgtattaca

SEQ ID NO: 164032 - DNA, 15 bp, Homo sapiens
tataatgtattacat

SEQ ID NO: 164033 - DNA, 15 bp, Homo sapiens
ataatgtattacatc

SEQ ID NO: 164034 - DNA, 15 bp, Homo sapiens
taatgtattacatct

SEQ ID NO: 164035 - DNA, 15 bp, Homo sapiens
aatgtattacatctt

SEQ ID NO: 164036 - DNA, 15 bp, Homo sapiens
atgtattacatcttt

SEQ ID NO: 164037 - DNA, 15 bp, Homo sapiens
tgtattacatctttt

SEQ ID NO: 164038 - DNA, 15 bp, Homo sapiens
gtattacatcttttt

SEQ ID NO: 164039 - DNA, 15 bp, Homo sapiens
tattacatctttttc

SEQ ID NO: 164040 - DNA, 15 bp, Homo sapiens
attacatctttttct

SEQ ID NO: 164041 - DNA, 15 bp, Homo sapiens
ttacatctttttcta

SEQ ID NO: 164042 - DNA, 15 bp, Homo sapiens
tacatctttttctac

SEQ ID NO: 164043 - DNA, 15 bp, Homo sapiens
acatctttttctacc

SEQ ID NO: 164044 - DNA, 15 bp, Homo sapiens
catctttttctacct

SEQ ID NO: 164045 - DNA, 15 bp, Homo sapiens
atctttttctacctt

SEQ ID NO: 164046 - DNA, 15 bp, Homo sapiens
tctttttctaccttt

SEQ ID NO: 164047 - DNA, 15 bp, Homo sapiens
ctttttctaccttta

SEQ ID NO: 164048 - DNA, 15 bp, Homo sapiens
tttttctacctttag

SEQ ID NO: 164049 - DNA, 15 bp, Homo sapiens
ttttctacctttaga

SEQ ID NO: 164050 - DNA, 15 bp, Homo sapiens
tttctacctttagaa

SEQ ID NO: 164051 - DNA, 15 bp, Homo sapiens
ttctacctttagaat

SEQ ID NO: 164052 - DNA, 15 bp, Homo sapiens
tctacctttagaatg

SEQ ID NO: 164053 - DNA, 15 bp, Homo sapiens
ctacctttagaatgg

SEQ ID NO: 164054 - DNA, 15 bp, Homo sapiens
tacctttagaatggt

SEQ ID NO: 164055 - DNA, 15 bp, Homo sapiens
acctttagaatggtt

SEQ ID NO: 164056 - DNA, 15 bp, Homo sapiens
cctttagaatggtta

SEQ ID NO: 164057 - DNA, 15 bp, Homo sapiens
ctttagaatggttaa

SEQ ID NO: 164058 - DNA, 15 bp, Homo sapiens
tttagaatggttaaa

SEQ ID NO: 164059 - DNA, 15 bp, Homo sapiens
ttagaatggttaaaa

SEQ ID NO: 164060 - DNA, 15 bp, Homo sapiens
tagaatggttaaaaa

SEQ ID NO: 164061 - DNA, 15 bp, Homo sapiens
agaatggttaaaaat

SEQ ID NO: 164062 - DNA, 15 bp, Homo sapiens
gaatggttaaaaata

SEQ ID NO: 164063 - DNA, 15 bp, Homo sapiens
aatggttaaaaatat

SEQ ID NO: 164064 - DNA, 15 bp, Homo sapiens
atggttaaaaatatt

SEQ ID NO: 164065 - DNA, 15 bp, Homo sapiens
tggttaaaaatattt

SEQ ID NO: 164066 - DNA, 15 bp, Homo sapiens
ggttaaaaatatttc

SEQ ID NO: 164067 - DNA, 15 bp, Homo sapiens
gttaaaaatatttct

SEQ ID NO: 164068 - DNA, 15 bp, Homo sapiens
ttaaaaatatttctc

SEQ ID NO: 164069 - DNA, 15 bp, Homo sapiens
taaaaatatttctcc

SEQ ID NO: 164070 - DNA, 15 bp, Homo sapiens
aaaaatatttctccg

SEQ ID NO: 164071 - DNA, 15 bp, Homo sapiens
aaaatatttctccgg

SEQ ID NO: 164072 - DNA, 15 bp, Homo sapiens
aaatatttctccggt

SEQ ID NO: 164073 - DNA, 15 bp, Homo sapiens
aatatttctccggta

SEQ ID NO: 164074 - DNA, 15 bp, Homo sapiens
atatttctccggtag

SEQ ID NO: 164075 - DNA, 15 bp, Homo sapiens
tatttctccggtagc

SEQ ID NO: 164076 - DNA, 15 bp, Homo sapiens
atttctccggtagcc

SEQ ID NO: 164077 - DNA, 15 bp, Homo sapiens
tttctccggtagcca

SEQ ID NO: 164078 - DNA, 15 bp, Homo sapiens
ttctccggtagccat

SEQ ID NO: 164079 - DNA, 15 bp, Homo sapiens
tctccggtagccata

SEQ ID NO: 164080 - DNA, 15 bp, Homo sapiens
ctccggtagccatat

SEQ ID NO: 164081 - DNA, 15 bp, Homo sapiens
tccggtagccatatg

SEQ ID NO: 164082 - DNA, 15 bp, Homo sapiens
ccggtagccatatga

SEQ ID NO: 164083 - DNA, 15 bp, Homo sapiens
cggtagccatatgat

SEQ ID NO: 164084 - DNA, 15 bp, Homo sapiens
ggtagccatatgatt

SEQ ID NO: 164085 - DNA, 15 bp, Homo sapiens
gtagccatatgatta

SEQ ID NO: 164086 - DNA, 15 bp, Homo sapiens
tagccatatgattat

SEQ ID NO: 164087 - DNA, 15 bp, Homo sapiens
agccatatgattatt

SEQ ID NO: 164088 - DNA, 15 bp, Homo sapiens
gccatatgattatta

SEQ ID NO: 164089 - DNA, 15 bp, Homo sapiens
ccatatgattattat

SEQ ID NO: 164090 - DNA, 15 bp, Homo sapiens
catatgattattatt

SEQ ID NO: 164091 - DNA, 15 bp, Homo sapiens
atatgattattattc

SEQ ID NO: 164092 - DNA, 15 bp, Homo sapiens
tatgattattattca

SEQ ID NO: 164093 - DNA, 15 bp, Homo sapiens
atgattattattcat

SEQ ID NO: 164094 - DNA, 15 bp, Homo sapiens
tgattattattcatc

SEQ ID NO: 164095 - DNA, 15 bp, Homo sapiens
gattattattcatcc

SEQ ID NO: 164096 - DNA, 15 bp, Homo sapiens
attattattcatcca

SEQ ID NO: 164097 - DNA, 15 bp, Homo sapiens
ttattattcatccat

SEQ ID NO: 164098 - DNA, 15 bp, Homo sapiens
tattattcatccatt

SEQ ID NO: 164099 - DNA, 15 bp, Homo sapiens
attattcatccatta

SEQ ID NO: 164100 - DNA, 15 bp, Homo sapiens
ttattcatccattag

SEQ ID NO: 164101 - DNA, 15 bp, Homo sapiens
tattcatccattaga

SEQ ID NO: 164102 - DNA, 15 bp, Homo sapiens
attcatccattagat

SEQ ID NO: 164103 - DNA, 15 bp, Homo sapiens
ttcatccattagata

SEQ ID NO: 164104 - DNA, 15 bp, Homo sapiens
tcatccattagataa

SEQ ID NO: 164105 - DNA, 15 bp, Homo sapiens
catccattagataat

SEQ ID NO: 164106 - DNA, 15 bp, Homo sapiens
atccattagataata

SEQ ID NO: 164107 - DNA, 15 bp, Homo sapiens
tccattagataatat

SEQ ID NO: 164108 - DNA, 15 bp, Homo sapiens
ccattagataatata

SEQ ID NO: 164109 - DNA, 15 bp, Homo sapiens
cattagataatatag

SEQ ID NO: 164110 - DNA, 15 bp, Homo sapiens
attagataatatagt

SEQ ID NO: 164111 - DNA, 15 bp, Homo sapiens
ttagataatatagtc

SEQ ID NO: 164112 - DNA, 15 bp, Homo sapiens
tagataatatagtca

SEQ ID NO: 164113 - DNA, 15 bp, Homo sapiens
agataatatagtcaa

SEQ ID NO: 164114 - DNA, 15 bp, Homo sapiens
gataatatagtcaaa

SEQ ID NO: 164115 - DNA, 15 bp, Homo sapiens
ataatatagtcaaat

SEQ ID NO: 164116 - DNA, 15 bp, Homo sapiens
taatatagtcaaatg

SEQ ID NO: 164117 - DNA, 15 bp, Homo sapiens
aatatagtcaaatgg

SEQ ID NO: 164118 - DNA, 15 bp, Homo sapiens
atatagtcaaatggg

SEQ ID NO: 164119 - DNA, 15 bp, Homo sapiens
tatagtcaaatgggc

SEQ ID NO: 164120 - DNA, 15 bp, Homo sapiens
atagtcaaatgggcc

SEQ ID NO: 164121 - DNA, 15 bp, Homo sapiens
tagtcaaatgggcca

SEQ ID NO: 164122 - DNA, 15 bp, Homo sapiens
agtcaaatgggccat

SEQ ID NO: 164123 - DNA, 15 bp, Homo sapiens
gtcaaatgggccatg

SEQ ID NO: 164124 - DNA, 15 bp, Homo sapiens
tcaaatgggccatgt

SEQ ID NO: 164125 - DNA, 15 bp, Homo sapiens
caaatgggccatgtt

SEQ ID NO: 164126 - DNA, 15 bp, Homo sapiens
aaatgggccatgtta

SEQ ID NO: 164127 - DNA, 15 bp, Homo sapiens
aatgggccatgttat

SEQ ID NO: 164128 - DNA, 15 bp, Homo sapiens
atgggccatgttatt

SEQ ID NO: 164129 - DNA, 15 bp, Homo sapiens
tgggccatgttattt

SEQ ID NO: 164130 - DNA, 15 bp, Homo sapiens
gggccatgttattta

SEQ ID NO: 164131 - DNA, 15 bp, Homo sapiens
ggccatgttatttac

SEQ ID NO: 164132 - DNA, 15 bp, Homo sapiens
gccatgttatttact

SEQ ID NO: 164133 - DNA, 15 bp, Homo sapiens
ccatgttatttactg

SEQ ID NO: 164134 - DNA, 15 bp, Homo sapiens
catgttatttactgt

SEQ ID NO: 164135 - DNA, 15 bp, Homo sapiens
atgttatttactgtt

SEQ ID NO: 164136 - DNA, 15 bp, Homo sapiens
tgttatttactgttc

SEQ ID NO: 164137 - DNA, 15 bp, Homo sapiens
gttatttactgttca

SEQ ID NO: 164138 - DNA, 15 bp, Homo sapiens
ttatttactgttcat

SEQ ID NO: 164139 - DNA, 15 bp, Homo sapiens
tatttactgttcata

SEQ ID NO: 164140 - DNA, 15 bp, Homo sapiens
atttactgttcatag

SEQ ID NO: 164141 - DNA, 15 bp, Homo sapiens
tttactgttcataga

SEQ ID NO: 164142 - DNA, 15 bp, Homo sapiens
ttactgttcatagaa

SEQ ID NO: 164143 - DNA, 15 bp, Homo sapiens
tactgttcatagaag

SEQ ID NO: 164144 - DNA, 15 bp, Homo sapiens
actgttcatagaaga

SEQ ID NO: 164145 - DNA, 15 bp, Homo sapiens
ctgttcatagaagag

SEQ ID NO: 164146 - DNA, 15 bp, Homo sapiens
tgttcatagaagagg

SEQ ID NO: 164147 - DNA, 15 bp, Homo sapiens
gttcatagaagaggg

SEQ ID NO: 164148 - DNA, 15 bp, Homo sapiens
ttcatagaagagggg

SEQ ID NO: 164149 - DNA, 15 bp, Homo sapiens
tcatagaagaggggc

SEQ ID NO: 164150 - DNA, 15 bp, Homo sapiens
catagaagaggggct

SEQ ID NO: 164151 - DNA, 15 bp, Homo sapiens
atagaagaggggctt

SEQ ID NO: 164152 - DNA, 15 bp, Homo sapiens
tagaagaggggcttt

SEQ ID NO: 164153 - DNA, 15 bp, Homo sapiens
agaagaggggctttt

SEQ ID NO: 164154 - DNA, 15 bp, Homo sapiens
gaagaggggcttttt

SEQ ID NO: 164155 - DNA, 15 bp, Homo sapiens
aagaggggctttttg

SEQ ID NO: 164156 - DNA, 15 bp, Homo sapiens
agaggggctttttgc

SEQ ID NO: 164157 - DNA, 15 bp, Homo sapiens
gaggggctttttgca

SEQ ID NO: 164158 - DNA, 15 bp, Homo sapiens
aggggctttttgcaa

SEQ ID NO: 164159 - DNA, 15 bp, Homo sapiens
ggggctttttgcaac

SEQ ID NO: 164160 - DNA, 15 bp, Homo sapiens
gggctttttgcaact

SEQ ID NO: 164161 - DNA, 15 bp, Homo sapiens
ggctttttgcaactt

SEQ ID NO: 164162 - DNA, 15 bp, Homo sapiens
gctttttgcaacttg

SEQ ID NO: 164163 - DNA, 15 bp, Homo sapiens
ctttttgcaacttgg

SEQ ID NO: 164164 - DNA, 15 bp, Homo sapiens
tttttgcaacttggg

SEQ ID NO: 164165 - DNA, 15 bp, Homo sapiens
ttttgcaacttgggc

SEQ ID NO: 164166 - DNA, 15 bp, Homo sapiens
tttgcaacttgggct

SEQ ID NO: 164167 - DNA, 15 bp, Homo sapiens
ttgcaacttgggcta

SEQ ID NO: 164168 - DNA, 15 bp, Homo sapiens
tgcaacttgggctac

SEQ ID NO: 164169 - DNA, 15 bp, Homo sapiens
gcaacttgggctaca

SEQ ID NO: 164170 - DNA, 15 bp, Homo sapiens
caacttgggctacaa

SEQ ID NO: 164171 - DNA, 15 bp, Homo sapiens
aacttgggctacaaa

SEQ ID NO: 164172 - DNA, 15 bp, Homo sapiens
acttgggctacaaag

SEQ ID NO: 164173 - DNA, 15 bp, Homo sapiens
cttgggctacaaagg

SEQ ID NO: 164174 - DNA, 15 bp, Homo sapiens
ttgggctacaaagga

SEQ ID NO: 164175 - DNA, 15 bp, Homo sapiens
tgggctacaaaggag

SEQ ID NO: 164176 - DNA, 15 bp, Homo sapiens
gggctacaaaggaga

SEQ ID NO: 164177 - DNA, 15 bp, Homo sapiens
ggctacaaaggagat

SEQ ID NO: 164178 - DNA, 15 bp, Homo sapiens
gctacaaaggagata

SEQ ID NO: 164179 - DNA, 15 bp, Homo sapiens
ctacaaaggagatat

SEQ ID NO: 164180 - DNA, 15 bp, Homo sapiens
tacaaaggagatatg

SEQ ID NO: 164181 - DNA, 15 bp, Homo sapiens
acaaaggagatatgt

SEQ ID NO: 164182 - DNA, 15 bp, Homo sapiens
caaaggagatatgta

SEQ ID NO: 164183 - DNA, 15 bp, Homo sapiens
aaaggagatatgtaa

SEQ ID NO: 164184 - DNA, 15 bp, Homo sapiens
aaggagatatgtaag

SEQ ID NO: 164185 - DNA, 15 bp, Homo sapiens
aggagatatgtaagg

SEQ ID NO: 164186 - DNA, 15 bp, Homo sapiens
ggagatatgtaagga

SEQ ID NO: 164187 - DNA, 15 bp, Homo sapiens
gagatatgtaaggaa

SEQ ID NO: 164188 - DNA, 15 bp, Homo sapiens
agatatgtaaggaat

SEQ ID NO: 164189 - DNA, 15 bp, Homo sapiens
gatatgtaaggaatt

SEQ ID NO: 164190 - DNA, 15 bp, Homo sapiens
atatgtaaggaattt

SEQ ID NO: 164191 - DNA, 15 bp, Homo sapiens
tatgtaaggaattta

SEQ ID NO: 164192 - DNA, 15 bp, Homo sapiens
atgtaaggaatttaa

SEQ ID NO: 164193 - DNA, 15 bp, Homo sapiens
tgtaaggaatttaag

SEQ ID NO: 164194 - DNA, 15 bp, Homo sapiens
gtaaggaatttaagg

SEQ ID NO: 164195 - DNA, 15 bp, Homo sapiens
taaggaatttaagga

SEQ ID NO: 164196 - DNA, 15 bp, Homo sapiens
aaggaatttaaggaa

SEQ ID NO: 164197 - DNA, 15 bp, Homo sapiens
aggaatttaaggaat

SEQ ID NO: 164198 - DNA, 15 bp, Homo sapiens
ggaatttaaggaatg

SEQ ID NO: 164199 - DNA, 15 bp, Homo sapiens
gaatttaaggaatgg

SEQ ID NO: 164200 - DNA, 15 bp, Homo sapiens
aatttaaggaatggt

SEQ ID NO: 164201 - DNA, 15 bp, Homo sapiens
atttaaggaatggtt

SEQ ID NO: 164202 - DNA, 15 bp, Homo sapiens
tttaaggaatggtta

SEQ ID NO: 164203 - DNA, 15 bp, Homo sapiens
ttaaggaatggttac

SEQ ID NO: 164204 - DNA, 15 bp, Homo sapiens
taaggaatggttaca

SEQ ID NO: 164205 - DNA, 15 bp, Homo sapiens
aaggaatggttacat

SEQ ID NO: 164206 - DNA, 15 bp, Homo sapiens
aggaatggttacatg

SEQ ID NO: 164207 - DNA, 15 bp, Homo sapiens
ggaatggttacatgg

SEQ ID NO: 164208 - DNA, 15 bp, Homo sapiens
gaatggttacatgga

SEQ ID NO: 164209 - DNA, 15 bp, Homo sapiens
aatggttacatggaa

SEQ ID NO: 164210 - DNA, 15 bp, Homo sapiens
atggttacatggaac

SEQ ID NO: 164211 - DNA, 15 bp, Homo sapiens
tggttacatggaact

SEQ ID NO: 164212 - DNA, 15 bp, Homo sapiens
ggttacatggaacta

SEQ ID NO: 164213 - DNA, 15 bp, Homo sapiens
gttacatggaactag

SEQ ID NO: 164214 - DNA, 15 bp, Homo sapiens
ttacatggaactaga

SEQ ID NO: 164215 - DNA, 15 bp, Homo sapiens
tacatggaactagat

SEQ ID NO: 164216 - DNA, 15 bp, Homo sapiens
acatggaactagatt

SEQ ID NO: 164217 - DNA, 15 bp, Homo sapiens
catggaactagattt

SEQ ID NO: 164218 - DNA, 15 bp, Homo sapiens
atggaactagattta

SEQ ID NO: 164219 - DNA, 15 bp, Homo sapiens
tggaactagatttaa

SEQ ID NO: 164220 - DNA, 15 bp, Homo sapiens
ggaactagatttaat

SEQ ID NO: 164221 - DNA, 15 bp, Homo sapiens
gaactagatttaatt

SEQ ID NO: 164222 - DNA, 15 bp, Homo sapiens
aactagatttaattg

SEQ ID NO: 164223 - DNA, 15 bp, Homo sapiens
actagatttaattga

SEQ ID NO: 164224 - DNA, 15 bp, Homo sapiens
ctagatttaattgaa

SEQ ID NO: 164225 - DNA, 15 bp, Homo sapiens
tagatttaattgaat

SEQ ID NO: 164226 - DNA, 15 bp, Homo sapiens
agatttaattgaatc

SEQ ID NO: 164227 - DNA, 15 bp, Homo sapiens
gatttaattgaatct

SEQ ID NO: 164228 - DNA, 15 bp, Homo sapiens
atttaattgaatcta

SEQ ID NO: 164229 - DNA, 15 bp, Homo sapiens
tttaattgaatctag

SEQ ID NO: 164230 - DNA, 15 bp, Homo sapiens
ttaattgaatctagt

SEQ ID NO: 164231 - DNA, 15 bp, Homo sapiens
taattgaatctagtg

SEQ ID NO: 164232 - DNA, 15 bp, Homo sapiens
aattgaatctagtgg

SEQ ID NO: 164233 - DNA, 15 bp, Homo sapiens
attgaatctagtggt

SEQ ID NO: 164234 - DNA, 15 bp, Homo sapiens
ttgaatctagtggtt

SEQ ID NO: 164235 - DNA, 15 bp, Homo sapiens
tgaatctagtggttt

SEQ ID NO: 164236 - DNA, 15 bp, Homo sapiens
gaatctagtggttta

SEQ ID NO: 164237 - DNA, 15 bp, Homo sapiens
aatctagtggtttaa

SEQ ID NO: 164238 - DNA, 15 bp, Homo sapiens
atctagtggtttaat

SEQ ID NO: 164239 - DNA, 15 bp, Homo sapiens
tctagtggtttaatt

SEQ ID NO: 164240 - DNA, 15 bp, Homo sapiens
ctagtggtttaattg

SEQ ID NO: 164241 - DNA, 15 bp, Homo sapiens
tagtggtttaattga

SEQ ID NO: 164242 - DNA, 15 bp, Homo sapiens
agtggtttaattgat

SEQ ID NO: 164243 - DNA, 15 bp, Homo sapiens
gtggtttaattgatt

SEQ ID NO: 164244 - DNA, 15 bp, Homo sapiens
tggtttaattgattc

SEQ ID NO: 164245 - DNA, 15 bp, Homo sapiens
ggtttaattgattca

SEQ ID NO: 164246 - DNA, 15 bp, Homo sapiens
gtttaattgattcac

SEQ ID NO: 164247 - DNA, 15 bp, Homo sapiens
tttaattgattcact

SEQ ID NO: 164248 - DNA, 15 bp, Homo sapiens
ttaattgattcacta

SEQ ID NO: 164249 - DNA, 15 bp, Homo sapiens
taattgattcactag

SEQ ID NO: 164250 - DNA, 15 bp, Homo sapiens
aattgattcactagg

SEQ ID NO: 164251 - DNA, 15 bp, Homo sapiens
attgattcactagga

SEQ ID NO: 164252 - DNA, 15 bp, Homo sapiens
ttgattcactaggat

SEQ ID NO: 164253 - DNA, 15 bp, Homo sapiens
tgattcactaggata

SEQ ID NO: 164254 - DNA, 15 bp, Homo sapiens
gattcactaggatat

SEQ ID NO: 164255 - DNA, 15 bp, Homo sapiens
attcactaggatata

SEQ ID NO: 164256 - DNA, 15 bp, Homo sapiens
ttcactaggatatat

SEQ ID NO: 164257 - DNA, 15 bp, Homo sapiens
tcactaggatatatg

SEQ ID NO: 164258 - DNA, 15 bp, Homo sapiens
cactaggatatatgc

SEQ ID NO: 164259 - DNA, 15 bp, Homo sapiens
actaggatatatgct

SEQ ID NO: 164260 - DNA, 15 bp, Homo sapiens
ctaggatatatgcta

SEQ ID NO: 164261 - DNA, 15 bp, Homo sapiens
taggatatatgctac

SEQ ID NO: 164262 - DNA, 15 bp, Homo sapiens
aggatatatgctact

SEQ ID NO: 164263 - DNA, 15 bp, Homo sapiens
ggatatatgctactg

SEQ ID NO: 164264 - DNA, 15 bp, Homo sapiens
gatatatgctactga

SEQ ID NO: 164265 - DNA, 15 bp, Homo sapiens
atatatgctactgaa

SEQ ID NO: 164266 - DNA, 15 bp, Homo sapiens
tatatgctactgaaa

SEQ ID NO: 164267 - DNA, 15 bp, Homo sapiens
atatgctactgaaag

SEQ ID NO: 164268 - DNA, 15 bp, Homo sapiens
tatgctactgaaagg

SEQ ID NO: 164269 - DNA, 15 bp, Homo sapiens
atgctactgaaaggg

SEQ ID NO: 164270 - DNA, 15 bp, Homo sapiens
tgctactgaaagggg

SEQ ID NO: 164271 - DNA, 15 bp, Homo sapiens
gctactgaaagggga

SEQ ID NO: 164272 - DNA, 15 bp, Homo sapiens
ctactgaaaggggaa

SEQ ID NO: 164273 - DNA, 15 bp, Homo sapiens
tactgaaaggggaat

SEQ ID NO: 164274 - DNA, 15 bp, Homo sapiens
actgaaaggggaatc

SEQ ID NO: 164275 - DNA, 15 bp, Homo sapiens
ctgaaaggggaatct

SEQ ID NO: 164276 - DNA, 15 bp, Homo sapiens
tgaaaggggaatctg

SEQ ID NO: 164277 - DNA, 15 bp, Homo sapiens
gaaaggggaatctgc

SEQ ID NO: 164278 - DNA, 15 bp, Homo sapiens
aaaggggaatctgct

SEQ ID NO: 164279 - DNA, 15 bp, Homo sapiens
aaggggaatctgctt

SEQ ID NO: 164280 - DNA, 15 bp, Homo sapiens
aggggaatctgctta

SEQ ID NO: 164281 - DNA, 15 bp, Homo sapiens
ggggaatctgcttaa

SEQ ID NO: 164282 - DNA, 15 bp, Homo sapiens
gggaatctgcttaaa

SEQ ID NO: 164283 - DNA, 15 bp, Homo sapiens
ggaatctgcttaaag

SEQ ID NO: 164284 - DNA, 15 bp, Homo sapiens
gaatctgcttaaagt

SEQ ID NO: 164285 - DNA, 15 bp, Homo sapiens
aatctgcttaaagtg

SEQ ID NO: 164286 - DNA, 15 bp, Homo sapiens
atctgcttaaagtgc

SEQ ID NO: 164287 - DNA, 15 bp, Homo sapiens
tctgcttaaagtgct

SEQ ID NO: 164288 - DNA, 15 bp, Homo sapiens
ctgcttaaagtgctt

SEQ ID NO: 164289 - DNA, 15 bp, Homo sapiens
tgcttaaagtgcttt

SEQ ID NO: 164290 - DNA, 15 bp, Homo sapiens
gcttaaagtgctttc

SEQ ID NO: 164291 - DNA, 15 bp, Homo sapiens
cttaaagtgctttct

SEQ ID NO: 164292 - DNA, 15 bp, Homo sapiens
ttaaagtgctttctg

SEQ ID NO: 164293 - DNA, 15 bp, Homo sapiens
taaagtgctttctga

SEQ ID NO: 164294 - DNA, 15 bp, Homo sapiens
aaagtgctttctgat

SEQ ID NO: 164295 - DNA, 15 bp, Homo sapiens
aagtgctttctgata

SEQ ID NO: 164296 - DNA, 15 bp, Homo sapiens
agtgctttctgatat

SEQ ID NO: 164297 - DNA, 15 bp, Homo sapiens
gtgctttctgatatt

SEQ ID NO: 164298 - DNA, 15 bp, Homo sapiens
tgctttctgatattt

SEQ ID NO: 164299 - DNA, 15 bp, Homo sapiens
gctttctgatattta

SEQ ID NO: 164300 - DNA, 15 bp, Homo sapiens
ctttctgatatttat

SEQ ID NO: 164301 - DNA, 15 bp, Homo sapiens
tttctgatatttatt

SEQ ID NO: 164302 - DNA, 15 bp, Homo sapiens
ttctgatatttatta

SEQ ID NO: 164303 - DNA, 15 bp, Homo sapiens
tctgatatttattat

SEQ ID NO: 164304 - DNA, 15 bp, Homo sapiens
ctgatatttattatt

SEQ ID NO: 164305 - DNA, 15 bp, Homo sapiens
tgatatttattatta

SEQ ID NO: 164306 - DNA, 15 bp, Homo sapiens
gatatttattattac

SEQ ID NO: 164307 - DNA, 15 bp, Homo sapiens
atatttattattact

SEQ ID NO: 164308 - DNA, 15 bp, Homo sapiens
tatttattattacta

SEQ ID NO: 164309 - DNA, 15 bp, Homo sapiens
atttattattactaa

SEQ ID NO: 164310 - DNA, 15 bp, Homo sapiens
tttattattactaaa

SEQ ID NO: 164311 - DNA, 15 bp, Homo sapiens
ttattattactaaaa

SEQ ID NO: 164312 - DNA, 15 bp, Homo sapiens
tattattactaaaac

SEQ ID NO: 164313 - DNA, 15 bp, Homo sapiens
attattactaaaact

SEQ ID NO: 164314 - DNA, 15 bp, Homo sapiens
ttattactaaaactt

SEQ ID NO: 164315 - DNA, 15 bp, Homo sapiens
tattactaaaactta

SEQ ID NO: 164316 - DNA, 15 bp, Homo sapiens
attactaaaacttag

SEQ ID NO: 164317 - DNA, 15 bp, Homo sapiens
ttactaaaacttaga

SEQ ID NO: 164318 - DNA, 15 bp, Homo sapiens
tactaaaacttagaa

SEQ ID NO: 164319 - DNA, 15 bp, Homo sapiens
actaaaacttagaat

SEQ ID NO: 164320 - DNA, 15 bp, Homo sapiens
ctaaaacttagaatt

SEQ ID NO: 164321 - DNA, 15 bp, Homo sapiens
taaaacttagaattt

SEQ ID NO: 164322 - DNA, 15 bp, Homo sapiens
aaaacttagaattta

SEQ ID NO: 164323 - DNA, 15 bp, Homo sapiens
aaacttagaatttat

SEQ ID NO: 164324 - DNA, 15 bp, Homo sapiens
aacttagaatttatt

SEQ ID NO: 164325 - DNA, 15 bp, Homo sapiens
acttagaatttatta

SEQ ID NO: 164326 - DNA, 15 bp, Homo sapiens
cttagaatttattaa

SEQ ID NO: 164327 - DNA, 15 bp, Homo sapiens
ttagaatttattaaa

SEQ ID NO: 164328 - DNA, 15 bp, Homo sapiens
tagaatttattaaaa

SEQ ID NO: 164329 - DNA, 15 bp, Homo sapiens
agaatttattaaaaa

SEQ ID NO: 164330 - DNA, 15 bp, Homo sapiens
gaatttattaaaaat

SEQ ID NO: 164331 - DNA, 15 bp, Homo sapiens
aatttattaaaaata

SEQ ID NO: 164332 - DNA, 15 bp, Homo sapiens
atttattaaaaatac

SEQ ID NO: 164333 - DNA, 15 bp, Homo sapiens
tttattaaaaatact

SEQ ID NO: 164334 - DNA, 15 bp, Homo sapiens
ttattaaaaatactg

SEQ ID NO: 164335 - DNA, 15 bp, Homo sapiens
tattaaaaatactga

SEQ ID NO: 164336 - DNA, 15 bp, Homo sapiens
attaaaaatactgac

SEQ ID NO: 164337 - DNA, 15 bp, Homo sapiens
ttaaaaatactgact

SEQ ID NO: 164338 - DNA, 15 bp, Homo sapiens
taaaaatactgactg

SEQ ID NO: 164339 - DNA, 15 bp, Homo sapiens
aaaaatactgactgt

SEQ ID NO: 164340 - DNA, 15 bp, Homo sapiens
aaaatactgactgtg

SEQ ID NO: 164341 - DNA, 15 bp, Homo sapiens
aaatactgactgtga

SEQ ID NO: 164342 - DNA, 15 bp, Homo sapiens
aatactgactgtgaa

SEQ ID NO: 164343 - DNA, 15 bp, Homo sapiens
atactgactgtgaaa

SEQ ID NO: 164344 - DNA, 15 bp, Homo sapiens
tactgactgtgaaaa

SEQ ID NO: 164345 - DNA, 15 bp, Homo sapiens
actgactgtgaaaat

SEQ ID NO: 164346 - DNA, 15 bp, Homo sapiens
ctgactgtgaaaatt

SEQ ID NO: 164347 - DNA, 15 bp, Homo sapiens
tgactgtgaaaatta

SEQ ID NO: 164348 - DNA, 15 bp, Homo sapiens
gactgtgaaaattac

SEQ ID NO: 164349 - DNA, 15 bp, Homo sapiens
actgtgaaaattact

SEQ ID NO: 164350 - DNA, 15 bp, Homo sapiens
ctgtgaaaattactt

SEQ ID NO: 164351 - DNA, 15 bp, Homo sapiens
tgtgaaaattacttg

SEQ ID NO: 164352 - DNA, 15 bp, Homo sapiens
gtgaaaattacttgg

SEQ ID NO: 164353 - DNA, 15 bp, Homo sapiens
tgaaaattacttggg

SEQ ID NO: 164354 - DNA, 15 bp, Homo sapiens
gaaaattacttgggt

SEQ ID NO: 164355 - DNA, 15 bp, Homo sapiens
aaaattacttgggtc

SEQ ID NO: 164356 - DNA, 15 bp, Homo sapiens
aaattacttgggtcg

SEQ ID NO: 164357 - DNA, 15 bp, Homo sapiens
aattacttgggtcgt

SEQ ID NO: 164358 - DNA, 15 bp, Homo sapiens
attacttgggtcgtt

SEQ ID NO: 164359 - DNA, 15 bp, Homo sapiens
ttacttgggtcgttt

SEQ ID NO: 164360 - DNA, 15 bp, Homo sapiens
tacttgggtcgtttg

SEQ ID NO: 164361 - DNA, 15 bp, Homo sapiens
acttgggtcgtttgc

SEQ ID NO: 164362 - DNA, 15 bp, Homo sapiens
cttgggtcgtttgcc

SEQ ID NO: 164363 - DNA, 15 bp, Homo sapiens
ttgggtcgtttgcct

SEQ ID NO: 164364 - DNA, 15 bp, Homo sapiens
tgggtcgtttgcctt

SEQ ID NO: 164365 - DNA, 15 bp, Homo sapiens
gggtcgtttgccttt

SEQ ID NO: 164366 - DNA, 15 bp, Homo sapiens
ggtcgtttgcctttt

SEQ ID NO: 164367 - DNA, 15 bp, Homo sapiens
gtcgtttgccttttt

SEQ ID NO: 164368 - DNA, 15 bp, Homo sapiens
tcgtttgccttttta

SEQ ID NO: 164369 - DNA, 15 bp, Homo sapiens
cgtttgcctttttaa

SEQ ID NO: 164370 - DNA, 15 bp, Homo sapiens
gtttgcctttttaaa

SEQ ID NO: 164371 - DNA, 15 bp, Homo sapiens
tttgcctttttaaaa

SEQ ID NO: 164372 - DNA, 15 bp, Homo sapiens
ttgcctttttaaaag

SEQ ID NO: 164373 - DNA, 15 bp, Homo sapiens
tgcctttttaaaagg

SEQ ID NO: 164374 - DNA, 15 bp, Homo sapiens
gcctttttaaaagga

SEQ ID NO: 164375 - DNA, 15 bp, Homo sapiens
cctttttaaaaggat

SEQ ID NO: 164376 - DNA, 15 bp, Homo sapiens
ctttttaaaaggatt

SEQ ID NO: 164377 - DNA, 15 bp, Homo sapiens
tttttaaaaggattt

SEQ ID NO: 164378 - DNA, 15 bp, Homo sapiens
ttttaaaaggatttt

SEQ ID NO: 164379 - DNA, 15 bp, Homo sapiens
tttaaaaggattttt

SEQ ID NO: 164380 - DNA, 15 bp, Homo sapiens
ttaaaaggatttttg

SEQ ID NO: 164381 - DNA, 15 bp, Homo sapiens
taaaaggatttttgg

SEQ ID NO: 164382 - DNA, 15 bp, Homo sapiens
aaaaggatttttggc

SEQ ID NO: 164383 - DNA, 15 bp, Homo sapiens
aaaggatttttggca

SEQ ID NO: 164384 - DNA, 15 bp, Homo sapiens
aaggatttttggcat

SEQ ID NO: 164385 - DNA, 15 bp, Homo sapiens
aggatttttggcatg

SEQ ID NO: 164386 - DNA, 15 bp, Homo sapiens
ggatttttggcatgt

SEQ ID NO: 164387 - DNA, 15 bp, Homo sapiens
gatttttggcatgtc

SEQ ID NO: 164388 - DNA, 15 bp, Homo sapiens
atttttggcatgtct

SEQ ID NO: 164389 - DNA, 15 bp, Homo sapiens
tttttggcatgtctc

SEQ ID NO: 164390 - DNA, 15 bp, Homo sapiens
ttttggcatgtctca

SEQ ID NO: 164391 - DNA, 15 bp, Homo sapiens
tttggcatgtctcat

SEQ ID NO: 164392 - DNA, 15 bp, Homo sapiens
ttggcatgtctcatt

SEQ ID NO: 164393 - DNA, 15 bp, Homo sapiens
tggcatgtctcatta

SEQ ID NO: 164394 - DNA, 15 bp, Homo sapiens
ggcatgtctcattaa

SEQ ID NO: 164395 - DNA, 15 bp, Homo sapiens
gcatgtctcattaaa

SEQ ID NO: 164396 - DNA, 15 bp, Homo sapiens
catgtctcattaaaa

SEQ ID NO: 164397 - DNA, 15 bp, Homo sapiens
atgtctcattaaaaa

SEQ ID NO: 164398 - DNA, 15 bp, Homo sapiens
tgtctcattaaaaaa

SEQ ID NO: 164399 - DNA, 15 bp, Homo sapiens
gtctcattaaaaaaa

SEQ ID NO: 164400 - DNA, 15 bp, Homo sapiens
tctcattaaaaaaag

SEQ ID NO: 164401 - DNA, 15 bp, Homo sapiens
ctcattaaaaaaaga

SEQ ID NO: 164402 - DNA, 15 bp, Homo sapiens
tcattaaaaaaagaa

SEQ ID NO: 164403 - DNA, 15 bp, Homo sapiens
cattaaaaaaagaaa

SEQ ID NO: 164404 - DNA, 15 bp, Homo sapiens
attaaaaaaagaaat

SEQ ID NO: 164405 - DNA, 15 bp, Homo sapiens
ttaaaaaaagaaata

SEQ ID NO: 164406 - DNA, 15 bp, Homo sapiens
taaaaaaagaaatac

SEQ ID NO: 164407 - DNA, 15 bp, Homo sapiens
aaaaaaagaaatact

SEQ ID NO: 164408 - DNA, 15 bp, Homo sapiens
aaaaaagaaatacta

SEQ ID NO: 164409 - DNA, 15 bp, Homo sapiens
aaaaagaaatactag

SEQ ID NO: 164410 - DNA, 15 bp, Homo sapiens
aaaagaaatactaga

SEQ ID NO: 164411 - DNA, 15 bp, Homo sapiens
aaagaaatactagat

SEQ ID NO: 164412 - DNA, 15 bp, Homo sapiens
aagaaatactagata

SEQ ID NO: 164413 - DNA, 15 bp, Homo sapiens
agaaatactagatat

SEQ ID NO: 164414 - DNA, 15 bp, Homo sapiens
gaaatactagatatc

SEQ ID NO: 164415 - DNA, 15 bp, Homo sapiens
aaatactagatatct

SEQ ID NO: 164416 - DNA, 15 bp, Homo sapiens
aatactagatatctt

SEQ ID NO: 164417 - DNA, 15 bp, Homo sapiens
atactagatatcttc

SEQ ID NO: 164418 - DNA, 15 bp, Homo sapiens
tactagatatcttca

SEQ ID NO: 164419 - DNA, 15 bp, Homo sapiens
actagatatcttcag

SEQ ID NO: 164420 - DNA, 15 bp, Homo sapiens
ctagatatcttcagt

SEQ ID NO: 164421 - DNA, 15 bp, Homo sapiens
tagatatcttcagtg

SEQ ID NO: 164422 - DNA, 15 bp, Homo sapiens
agatatcttcagtga

SEQ ID NO: 164423 - DNA, 15 bp, Homo sapiens
gatatcttcagtgaa

SEQ ID NO: 164424 - DNA, 15 bp, Homo sapiens
atatcttcagtgaag

SEQ ID NO: 164425 - DNA, 15 bp, Homo sapiens
tatcttcagtgaagt

SEQ ID NO: 164426 - DNA, 15 bp, Homo sapiens
atcttcagtgaagtt

SEQ ID NO: 164427 - DNA, 15 bp, Homo sapiens
tcttcagtgaagtta

SEQ ID NO: 164428 - DNA, 15 bp, Homo sapiens
cttcagtgaagttac

SEQ ID NO: 164429 - DNA, 15 bp, Homo sapiens
ttcagtgaagttaca

SEQ ID NO: 164430 - DNA, 15 bp, Homo sapiens
tcagtgaagttacaa

SEQ ID NO: 164431 - DNA, 15 bp, Homo sapiens
cagtgaagttacaaa

SEQ ID NO: 164432 - DNA, 15 bp, Homo sapiens
agtgaagttacaaat

SEQ ID NO: 164433 - DNA, 15 bp, Homo sapiens
gtgaagttacaaatc

SEQ ID NO: 164434 - DNA, 15 bp, Homo sapiens
tgaagttacaaatcg

SEQ ID NO: 164435 - DNA, 15 bp, Homo sapiens
gaagttacaaatcga

SEQ ID NO: 164436 - DNA, 15 bp, Homo sapiens
aagttacaaatcgaa

SEQ ID NO: 164437 - DNA, 15 bp, Homo sapiens
agttacaaatcgaat

SEQ ID NO: 164438 - DNA, 15 bp, Homo sapiens
gttacaaatcgaata

SEQ ID NO: 164439 - DNA, 15 bp, Homo sapiens
ttacaaatcgaatac

SEQ ID NO: 164440 - DNA, 15 bp, Homo sapiens
tacaaatcgaataca

SEQ ID NO: 164441 - DNA, 15 bp, Homo sapiens
acaaatcgaatacac

SEQ ID NO: 164442 - DNA, 15 bp, Homo sapiens
caaatcgaatacaca

SEQ ID NO: 164443 - DNA, 15 bp, Homo sapiens
aaatcgaatacacat

SEQ ID NO: 164444 - DNA, 15 bp, Homo sapiens
aatcgaatacacatt

SEQ ID NO: 164445 - DNA, 15 bp, Homo sapiens
atcgaatacacattg

SEQ ID NO: 164446 - DNA, 15 bp, Homo sapiens
tcgaatacacattgg

SEQ ID NO: 164447 - DNA, 15 bp, Homo sapiens
cgaatacacattggc

SEQ ID NO: 164448 - DNA, 15 bp, Homo sapiens
gaatacacattggct

SEQ ID NO: 164449 - DNA, 15 bp, Homo sapiens
aatacacattggctc

SEQ ID NO: 164450 - DNA, 15 bp, Homo sapiens
atacacattggctct

SEQ ID NO: 164451 - DNA, 15 bp, Homo sapiens
tacacattggctctg

SEQ ID NO: 164452 - DNA, 15 bp, Homo sapiens
acacattggctctga

SEQ ID NO: 164453 - DNA, 15 bp, Homo sapiens
cacattggctctgaa

SEQ ID NO: 164454 - DNA, 15 bp, Homo sapiens
acattggctctgaaa

SEQ ID NO: 164455 - DNA, 15 bp, Homo sapiens
cattggctctgaaat

SEQ ID NO: 164456 - DNA, 15 bp, Homo sapiens
attggctctgaaatt

SEQ ID NO: 164457 - DNA, 15 bp, Homo sapiens
ttggctctgaaattc

SEQ ID NO: 164458 - DNA, 15 bp, Homo sapiens
tggctctgaaattct

SEQ ID NO: 164459 - DNA, 15 bp, Homo sapiens
ggctctgaaattctg

SEQ ID NO: 164460 - DNA, 15 bp, Homo sapiens
gctctgaaattctga

SEQ ID NO: 164461 - DNA, 15 bp, Homo sapiens
ctctgaaattctgat

SEQ ID NO: 164462 - DNA, 15 bp, Homo sapiens
tctgaaattctgatt

SEQ ID NO: 164463 - DNA, 15 bp, Homo sapiens
ctgaaattctgattg

SEQ ID NO: 164464 - DNA, 15 bp, Homo sapiens
tgaaattctgattga

SEQ ID NO: 164465 - DNA, 15 bp, Homo sapiens
gaaattctgattgat

SEQ ID NO: 164466 - DNA, 15 bp, Homo sapiens
aaattctgattgata

SEQ ID NO: 164467 - DNA, 15 bp, Homo sapiens
aattctgattgatac

SEQ ID NO: 164468 - DNA, 15 bp, Homo sapiens
attctgattgatact

SEQ ID NO: 164469 - DNA, 15 bp, Homo sapiens
ttctgattgatactg

SEQ ID NO: 164470 - DNA, 15 bp, Homo sapiens
tctgattgatactgg

SEQ ID NO: 164471 - DNA, 15 bp, Homo sapiens
ctgattgatactggg

SEQ ID NO: 164472 - DNA, 15 bp, Homo sapiens
tgattgatactgggt

SEQ ID NO: 164473 - DNA, 15 bp, Homo sapiens
gattgatactgggtc

SEQ ID NO: 164474 - DNA, 15 bp, Homo sapiens
attgatactgggtca

SEQ ID NO: 164475 - DNA, 15 bp, Homo sapiens
ttgatactgggtcat

SEQ ID NO: 164476 - DNA, 15 bp, Homo sapiens
tgatactgggtcata

SEQ ID NO: 164477 - DNA, 15 bp, Homo sapiens
gatactgggtcataa

SEQ ID NO: 164478 - DNA, 15 bp, Homo sapiens
atactgggtcataaa

SEQ ID NO: 164479 - DNA, 15 bp, Homo sapiens
tactgggtcataaaa

SEQ ID NO: 164480 - DNA, 15 bp, Homo sapiens
actgggtcataaaaa

SEQ ID NO: 164481 - DNA, 15 bp, Homo sapiens
ctgggtcataaaaag

SEQ ID NO: 164482 - DNA, 15 bp, Homo sapiens
tgggtcataaaaagt

SEQ ID NO: 164483 - DNA, 15 bp, Homo sapiens
gggtcataaaaagtt

SEQ ID NO: 164484 - DNA, 15 bp, Homo sapiens
ggtcataaaaagttt

SEQ ID NO: 164485 - DNA, 15 bp, Homo sapiens
gtcataaaaagtttt

SEQ ID NO: 164486 - DNA, 15 bp, Homo sapiens
tcataaaaagttttc

SEQ ID NO: 164487 - DNA, 15 bp, Homo sapiens
cataaaaagttttcc

SEQ ID NO: 164488 - DNA, 15 bp, Homo sapiens
ataaaaagttttccc

SEQ ID NO: 164489 - DNA, 15 bp, Homo sapiens
taaaaagttttccca

SEQ ID NO: 164490 - DNA, 15 bp, Homo sapiens
aaaaagttttcccaa

SEQ ID NO: 164491 - DNA, 15 bp, Homo sapiens
aaaagttttcccaaa

SEQ ID NO: 164492 - DNA, 15 bp, Homo sapiens
aaagttttcccaaat

SEQ ID NO: 164493 - DNA, 15 bp, Homo sapiens
aagttttcccaaatc

SEQ ID NO: 164494 - DNA, 15 bp, Homo sapiens
agttttcccaaatca

SEQ ID NO: 164495 - DNA, 15 bp, Homo sapiens
gttttcccaaatcag

SEQ ID NO: 164496 - DNA, 15 bp, Homo sapiens
ttttcccaaatcaga

SEQ ID NO: 164497 - DNA, 15 bp, Homo sapiens
tttcccaaatcagac

SEQ ID NO: 164498 - DNA, 15 bp, Homo sapiens
ttcccaaatcagact

SEQ ID NO: 164499 - DNA, 15 bp, Homo sapiens
tcccaaatcagactt

SEQ ID NO: 164500 - DNA, 15 bp, Homo sapiens
cccaaatcagacttg

SEQ ID NO: 164501 - DNA, 15 bp, Homo sapiens
ccaaatcagacttgg

SEQ ID NO: 164502 - DNA, 15 bp, Homo sapiens
caaatcagacttgga

SEQ ID NO: 164503 - DNA, 15 bp, Homo sapiens
aaatcagacttggaa

SEQ ID NO: 164504 - DNA, 15 bp, Homo sapiens
aatcagacttggaaa

SEQ ID NO: 164505 - DNA, 15 bp, Homo sapiens
atcagacttggaaag

SEQ ID NO: 164506 - DNA, 15 bp, Homo sapiens
tcagacttggaaagt

SEQ ID NO: 164507 - DNA, 15 bp, Homo sapiens
cagacttggaaagtg

SEQ ID NO: 164508 - DNA, 15 bp, Homo sapiens
agacttggaaagtga

SEQ ID NO: 164509 - DNA, 15 bp, Homo sapiens
gacttggaaagtgat

SEQ ID NO: 164510 - DNA, 15 bp, Homo sapiens
acttggaaagtgatc

SEQ ID NO: 164511 - DNA, 15 bp, Homo sapiens
cttggaaagtgatca

SEQ ID NO: 164512 - DNA, 15 bp, Homo sapiens
ttggaaagtgatcac

SEQ ID NO: 164513 - DNA, 15 bp, Homo sapiens
tggaaagtgatcact

SEQ ID NO: 164514 - DNA, 15 bp, Homo sapiens
ggaaagtgatcactc

SEQ ID NO: 164515 - DNA, 15 bp, Homo sapiens
gaaagtgatcactct

SEQ ID NO: 164516 - DNA, 15 bp, Homo sapiens
aaagtgatcactctc

SEQ ID NO: 164517 - DNA, 15 bp, Homo sapiens
aagtgatcactctct

SEQ ID NO: 164518 - DNA, 15 bp, Homo sapiens
agtgatcactctctt

SEQ ID NO: 164519 - DNA, 15 bp, Homo sapiens
gtgatcactctcttg

SEQ ID NO: 164520 - DNA, 15 bp, Homo sapiens
tgatcactctcttgt

SEQ ID NO: 164521 - DNA, 15 bp, Homo sapiens
gatcactctcttgtt

SEQ ID NO: 164522 - DNA, 15 bp, Homo sapiens
atcactctcttgtta

SEQ ID NO: 164523 - DNA, 15 bp, Homo sapiens
tcactctcttgttac

SEQ ID NO: 164524 - DNA, 15 bp, Homo sapiens
cactctcttgttact

SEQ ID NO: 164525 - DNA, 15 bp, Homo sapiens
actctcttgttactc

SEQ ID NO: 164526 - DNA, 15 bp, Homo sapiens
ctctcttgttactct

SEQ ID NO: 164527 - DNA, 15 bp, Homo sapiens
tctcttgttactctt

SEQ ID NO: 164528 - DNA, 15 bp, Homo sapiens
ctcttgttactcttt

SEQ ID NO: 164529 - DNA, 15 bp, Homo sapiens
tcttgttactctttt

SEQ ID NO: 164530 - DNA, 15 bp, Homo sapiens
cttgttactcttttt

SEQ ID NO: 164531 - DNA, 15 bp, Homo sapiens
ttgttactctttttt

SEQ ID NO: 164532 - DNA, 15 bp, Homo sapiens
tgttactcttttttc

SEQ ID NO: 164533 - DNA, 15 bp, Homo sapiens
gttactcttttttcc

SEQ ID NO: 164534 - DNA, 15 bp, Homo sapiens
ttactcttttttcct

SEQ ID NO: 164535 - DNA, 15 bp, Homo sapiens
tactcttttttcctt

SEQ ID NO: 164536 - DNA, 15 bp, Homo sapiens
actcttttttccttg

SEQ ID NO: 164537 - DNA, 15 bp, Homo sapiens
ctcttttttccttgt

SEQ ID NO: 164538 - DNA, 15 bp, Homo sapiens
tcttttttccttgtc

SEQ ID NO: 164539 - DNA, 15 bp, Homo sapiens
cttttttccttgtca

SEQ ID NO: 164540 - DNA, 15 bp, Homo sapiens
ttttttccttgtcat

SEQ ID NO: 164541 - DNA, 15 bp, Homo sapiens
tttttccttgtcatg

SEQ ID NO: 164542 - DNA, 15 bp, Homo sapiens
ttttccttgtcatgg

SEQ ID NO: 164543 - DNA, 15 bp, Homo sapiens
tttccttgtcatggg

SEQ ID NO: 164544 - DNA, 15 bp, Homo sapiens
ttccttgtcatgggt

SEQ ID NO: 164545 - DNA, 15 bp, Homo sapiens
tccttgtcatgggtg

SEQ ID NO: 164546 - DNA, 15 bp, Homo sapiens
ccttgtcatgggtga

SEQ ID NO: 164547 - DNA, 15 bp, Homo sapiens
cttgtcatgggtgat

SEQ ID NO: 164548 - DNA, 15 bp, Homo sapiens
ttgtcatgggtgata

SEQ ID NO: 164549 - DNA, 15 bp, Homo sapiens
tgtcatgggtgatag

SEQ ID NO: 164550 - DNA, 15 bp, Homo sapiens
gtcatgggtgatagc

SEQ ID NO: 164551 - DNA, 15 bp, Homo sapiens
tcatgggtgatagcc

SEQ ID NO: 164552 - DNA, 15 bp, Homo sapiens
catgggtgatagcca

SEQ ID NO: 164553 - DNA, 15 bp, Homo sapiens
atgggtgatagccat

SEQ ID NO: 164554 - DNA, 15 bp, Homo sapiens
tgggtgatagccatt

SEQ ID NO: 164555 - DNA, 15 bp, Homo sapiens
gggtgatagccattt

SEQ ID NO: 164556 - DNA, 15 bp, Homo sapiens
ggtgatagccatttg

SEQ ID NO: 164557 - DNA, 15 bp, Homo sapiens
gtgatagccatttgt

SEQ ID NO: 164558 - DNA, 15 bp, Homo sapiens
tgatagccatttgtg

SEQ ID NO: 164559 - DNA, 15 bp, Homo sapiens
gatagccatttgtgt

SEQ ID NO: 164560 - DNA, 15 bp, Homo sapiens
atagccatttgtgtt

SEQ ID NO: 164561 - DNA, 15 bp, Homo sapiens
tagccatttgtgttt

SEQ ID NO: 164562 - DNA, 15 bp, Homo sapiens
agccatttgtgttta

SEQ ID NO: 164563 - DNA, 15 bp, Homo sapiens
gccatttgtgtttat

SEQ ID NO: 164564 - DNA, 15 bp, Homo sapiens
ccatttgtgtttatt

SEQ ID NO: 164565 - DNA, 15 bp, Homo sapiens
catttgtgtttattg

SEQ ID NO: 164566 - DNA, 15 bp, Homo sapiens
atttgtgtttattgg

SEQ ID NO: 164567 - DNA, 15 bp, Homo sapiens
tttgtgtttattgga

SEQ ID NO: 164568 - DNA, 15 bp, Homo sapiens
ttgtgtttattggaa

SEQ ID NO: 164569 - DNA, 15 bp, Homo sapiens
tgtgtttattggaag

SEQ ID NO: 164570 - DNA, 15 bp, Homo sapiens
gtgtttattggaaga

SEQ ID NO: 164571 - DNA, 15 bp, Homo sapiens
tgtttattggaagat

SEQ ID NO: 164572 - DNA, 15 bp, Homo sapiens
gtttattggaagatc

SEQ ID NO: 164573 - DNA, 15 bp, Homo sapiens
tttattggaagatcg

SEQ ID NO: 164574 - DNA, 15 bp, Homo sapiens
ttattggaagatcgg

SEQ ID NO: 164575 - DNA, 15 bp, Homo sapiens
tattggaagatcggt

SEQ ID NO: 164576 - DNA, 15 bp, Homo sapiens
attggaagatcggtg

SEQ ID NO: 164577 - DNA, 15 bp, Homo sapiens
ttggaagatcggtga

SEQ ID NO: 164578 - DNA, 15 bp, Homo sapiens
tggaagatcggtgaa

SEQ ID NO: 164579 - DNA, 15 bp, Homo sapiens
ggaagatcggtgaat

SEQ ID NO: 164580 - DNA, 15 bp, Homo sapiens
gaagatcggtgaatt

SEQ ID NO: 164581 - DNA, 15 bp, Homo sapiens
aagatcggtgaattt

SEQ ID NO: 164582 - DNA, 15 bp, Homo sapiens
agatcggtgaatttt

SEQ ID NO: 164583 - DNA, 15 bp, Homo sapiens
gatcggtgaatttta

SEQ ID NO: 164584 - DNA, 15 bp, Homo sapiens
atcggtgaattttaa

SEQ ID NO: 164585 - DNA, 15 bp, Homo sapiens
tcggtgaattttaag

SEQ ID NO: 164586 - DNA, 15 bp, Homo sapiens
cggtgaattttaagg

SEQ ID NO: 164587 - DNA, 15 bp, Homo sapiens
ggtgaattttaagga

SEQ ID NO: 164588 - DNA, 15 bp, Homo sapiens
gtgaattttaaggaa

SEQ ID NO: 164589 - DNA, 15 bp, Homo sapiens
tgaattttaaggaac

SEQ ID NO: 164590 - DNA, 15 bp, Homo sapiens
gaattttaaggaaca

SEQ ID NO: 164591 - DNA, 15 bp, Homo sapiens
aattttaaggaacat

SEQ ID NO: 164592 - DNA, 15 bp, Homo sapiens
attttaaggaacata

SEQ ID NO: 164593 - DNA, 15 bp, Homo sapiens
ttttaaggaacatag

SEQ ID NO: 164594 - DNA, 15 bp, Homo sapiens
tttaaggaacatagg

SEQ ID NO: 164595 - DNA, 15 bp, Homo sapiens
ttaaggaacataggc

SEQ ID NO: 164596 - DNA, 15 bp, Homo sapiens
taaggaacataggcc

SEQ ID NO: 164597 - DNA, 15 bp, Homo sapiens
aaggaacataggccc

SEQ ID NO: 164598 - DNA, 15 bp, Homo sapiens
aggaacataggccca

SEQ ID NO: 164599 - DNA, 15 bp, Homo sapiens
ggaacataggcccaa

SEQ ID NO: 164600 - DNA, 15 bp, Homo sapiens
gaacataggcccaaa

SEQ ID NO: 164601 - DNA, 15 bp, Homo sapiens
aacataggcccaaat

SEQ ID NO: 164602 - DNA, 15 bp, Homo sapiens
acataggcccaaatt

SEQ ID NO: 164603 - DNA, 15 bp, Homo sapiens
cataggcccaaattt

SEQ ID NO: 164604 - DNA, 15 bp, Homo sapiens
ataggcccaaatttg

SEQ ID NO: 164605 - DNA, 15 bp, Homo sapiens
taggcccaaatttga

SEQ ID NO: 164606 - DNA, 15 bp, Homo sapiens
aggcccaaatttgag

SEQ ID NO: 164607 - DNA, 15 bp, Homo sapiens
ggcccaaatttgagg

SEQ ID NO: 164608 - DNA, 15 bp, Homo sapiens
gcccaaatttgagga

SEQ ID NO: 164609 - DNA, 15 bp, Homo sapiens
cccaaatttgaggaa

SEQ ID NO: 164610 - DNA, 15 bp, Homo sapiens
ccaaatttgaggaag

SEQ ID NO: 164611 - DNA, 15 bp, Homo sapiens
caaatttgaggaagg

SEQ ID NO: 164612 - DNA, 15 bp, Homo sapiens
aaatttgaggaaggg

SEQ ID NO: 164613 - DNA, 15 bp, Homo sapiens
aatttgaggaagggc

SEQ ID NO: 164614 - DNA, 15 bp, Homo sapiens
atttgaggaagggcc

SEQ ID NO: 164615 - DNA, 15 bp, Homo sapiens
tttgaggaagggcca

SEQ ID NO: 164616 - DNA, 15 bp, Homo sapiens
ttgaggaagggccat

SEQ ID NO: 164617 - DNA, 15 bp, Homo sapiens
tgaggaagggccatg

SEQ ID NO: 164618 - DNA, 15 bp, Homo sapiens
gaggaagggccatgg

SEQ ID NO: 164619 - DNA, 15 bp, Homo sapiens
aggaagggccatggt

SEQ ID NO: 164620 - DNA, 15 bp, Homo sapiens
ggaagggccatggtt

SEQ ID NO: 164621 - DNA, 15 bp, Homo sapiens
gaagggccatggttt

SEQ ID NO: 164622 - DNA, 15 bp, Homo sapiens
aagggccatggtttt

SEQ ID NO: 164623 - DNA, 15 bp, Homo sapiens
agggccatggttttt

SEQ ID NO: 164624 - DNA, 15 bp, Homo sapiens
gggccatggtttttg

SEQ ID NO: 164625 - DNA, 15 bp, Homo sapiens
ggccatggtttttga

SEQ ID NO: 164626 - DNA, 15 bp, Homo sapiens
gccatggtttttgat

SEQ ID NO: 164627 - DNA, 15 bp, Homo sapiens
ccatggtttttgatc

SEQ ID NO: 164628 - DNA, 15 bp, Homo sapiens
catggtttttgatcc

SEQ ID NO: 164629 - DNA, 15 bp, Homo sapiens
atggtttttgatccc

SEQ ID NO: 164630 - DNA, 15 bp, Homo sapiens
tggtttttgatccct

SEQ ID NO: 164631 - DNA, 15 bp, Homo sapiens
ggtttttgatccctc

SEQ ID NO: 164632 - DNA, 15 bp, Homo sapiens
gtttttgatccctcc

SEQ ID NO: 164633 - DNA, 15 bp, Homo sapiens
tttttgatccctcca

SEQ ID NO: 164634 - DNA, 15 bp, Homo sapiens
ttttgatccctccat

SEQ ID NO: 164635 - DNA, 15 bp, Homo sapiens
tttgatccctccatt

SEQ ID NO: 164636 - DNA, 15 bp, Homo sapiens
ttgatccctccattc

SEQ ID NO: 164637 - DNA, 15 bp, Homo sapiens
tgatccctccattct

SEQ ID NO: 164638 - DNA, 15 bp, Homo sapiens
gatccctccattctg

SEQ ID NO: 164639 - DNA, 15 bp, Homo sapiens
atccctccattctga

SEQ ID NO: 164640 - DNA, 15 bp, Homo sapiens
tccctccattctgac

SEQ ID NO: 164641 - DNA, 15 bp, Homo sapiens
ccctccattctgacc

SEQ ID NO: 164642 - DNA, 15 bp, Homo sapiens
cctccattctgaccg

SEQ ID NO: 164643 - DNA, 15 bp, Homo sapiens
ctccattctgaccgg

SEQ ID NO: 164644 - DNA, 15 bp, Homo sapiens
tccattctgaccgga

SEQ ID NO: 164645 - DNA, 15 bp, Homo sapiens
ccattctgaccggat

SEQ ID NO: 164646 - DNA, 15 bp, Homo sapiens
cattctgaccggatc

SEQ ID NO: 164647 - DNA, 15 bp, Homo sapiens
attctgaccggatct

SEQ ID NO: 164648 - DNA, 15 bp, Homo sapiens
ttctgaccggatctc

SEQ ID NO: 164649 - DNA, 15 bp, Homo sapiens
tctgaccggatctct

SEQ ID NO: 164650 - DNA, 15 bp, Homo sapiens
ctgaccggatctctg

SEQ ID NO: 164651 - DNA, 15 bp, Homo sapiens
tgaccggatctctgc

SEQ ID NO: 164652 - DNA, 15 bp, Homo sapiens
gaccggatctctgca

SEQ ID NO: 164653 - DNA, 15 bp, Homo sapiens
accggatctctgcat

SEQ ID NO: 164654 - DNA, 15 bp, Homo sapiens
ccggatctctgcatt

SEQ ID NO: 164655 - DNA, 15 bp, Homo sapiens
cggatctctgcattg

SEQ ID NO: 164656 - DNA, 15 bp, Homo sapiens
ggatctctgcattgt

SEQ ID NO: 164657 - DNA, 15 bp, Homo sapiens
gatctctgcattgtg

SEQ ID NO: 164658 - DNA, 15 bp, Homo sapiens
atctctgcattgtgt

SEQ ID NO: 164659 - DNA, 15 bp, Homo sapiens
tctctgcattgtgtc

SEQ ID NO: 164660 - DNA, 15 bp, Homo sapiens
ctctgcattgtgtct

SEQ ID NO: 164661 - DNA, 15 bp, Homo sapiens
tctgcattgtgtcta

SEQ ID NO: 164662 - DNA, 15 bp, Homo sapiens
ctgcattgtgtctac

SEQ ID NO: 164663 - DNA, 15 bp, Homo sapiens
tgcattgtgtctact

SEQ ID NO: 164664 - DNA, 15 bp, Homo sapiens
gcattgtgtctacta

SEQ ID NO: 164665 - DNA, 15 bp, Homo sapiens
cattgtgtctactag

SEQ ID NO: 164666 - DNA, 15 bp, Homo sapiens
attgtgtctactagg

SEQ ID NO: 164667 - DNA, 15 bp, Homo sapiens
ttgtgtctactaggg

SEQ ID NO: 164668 - DNA, 15 bp, Homo sapiens
tgtgtctactagggg

SEQ ID NO: 164669 - DNA, 15 bp, Homo sapiens
gtgtctactagggga

SEQ ID NO: 164670 - DNA, 15 bp, Homo sapiens
tgtctactaggggag

SEQ ID NO: 164671 - DNA, 15 bp, Homo sapiens
gtctactaggggaga

SEQ ID NO: 164672 - DNA, 15 bp, Homo sapiens
tctactaggggagaa

SEQ ID NO: 164673 - DNA, 15 bp, Homo sapiens
ctactaggggagaat

SEQ ID NO: 164674 - DNA, 15 bp, Homo sapiens
tactaggggagaatc

SEQ ID NO: 164675 - DNA, 15 bp, Homo sapiens
actaggggagaatcg

SEQ ID NO: 164676 - DNA, 15 bp, Homo sapiens
ctaggggagaatcgc

SEQ ID NO: 164677 - DNA, 15 bp, Homo sapiens
taggggagaatcgct

SEQ ID NO: 164678 - DNA, 15 bp, Homo sapiens
aggggagaatcgctt

SEQ ID NO: 164679 - DNA, 15 bp, Homo sapiens
ggggagaatcgcttt

SEQ ID NO: 164680 - DNA, 15 bp, Homo sapiens
gggagaatcgctttg

SEQ ID NO: 164681 - DNA, 15 bp, Homo sapiens
ggagaatcgctttgt

SEQ ID NO: 164682 - DNA, 15 bp, Homo sapiens
gagaatcgctttgtg

SEQ ID NO: 164683 - DNA, 15 bp, Homo sapiens
agaatcgctttgtgt

SEQ ID NO: 164684 - DNA, 15 bp, Homo sapiens
gaatcgctttgtgtc

SEQ ID NO: 164685 - DNA, 15 bp, Homo sapiens
aatcgctttgtgtca

SEQ ID NO: 164686 - DNA, 15 bp, Homo sapiens
atcgctttgtgtcac

SEQ ID NO: 164687 - DNA, 15 bp, Homo sapiens
tcgctttgtgtcacc

SEQ ID NO: 164688 - DNA, 15 bp, Homo sapiens
cgctttgtgtcacca

SEQ ID NO: 164689 - DNA, 15 bp, Homo sapiens
gctttgtgtcaccat

SEQ ID NO: 164690 - DNA, 15 bp, Homo sapiens
ctttgtgtcaccatt

SEQ ID NO: 164691 - DNA, 15 bp, Homo sapiens
tttgtgtcaccatta

SEQ ID NO: 164692 - DNA, 15 bp, Homo sapiens
ttgtgtcaccattat

SEQ ID NO: 164693 - DNA, 15 bp, Homo sapiens
tgtgtcaccattatc

SEQ ID NO: 164694 - DNA, 15 bp, Homo sapiens
gtgtcaccattatct

SEQ ID NO: 164695 - DNA, 15 bp, Homo sapiens
tgtcaccattatctt

SEQ ID NO: 164696 - DNA, 15 bp, Homo sapiens
gtcaccattatcttg

SEQ ID NO: 164697 - DNA, 15 bp, Homo sapiens
tcaccattatcttgg

SEQ ID NO: 164698 - DNA, 15 bp, Homo sapiens
caccattatcttggg

SEQ ID NO: 164699 - DNA, 15 bp, Homo sapiens
accattatcttggga

SEQ ID NO: 164700 - DNA, 15 bp, Homo sapiens
ccattatcttgggac

SEQ ID NO: 164701 - DNA, 15 bp, Homo sapiens
cattatcttgggact

SEQ ID NO: 164702 - DNA, 15 bp, Homo sapiens
attatcttgggactt

SEQ ID NO: 164703 - DNA, 15 bp, Homo sapiens
ttatcttgggacttg

SEQ ID NO: 164704 - DNA, 15 bp, Homo sapiens
tatcttgggacttgg

SEQ ID NO: 164705 - DNA, 15 bp, Homo sapiens
atcttgggacttggt

SEQ ID NO: 164706 - DNA, 15 bp, Homo sapiens
tcttgggacttggtg

SEQ ID NO: 164707 - DNA, 15 bp, Homo sapiens
cttgggacttggtgg

SEQ ID NO: 164708 - DNA, 15 bp, Homo sapiens
ttgggacttggtggg

SEQ ID NO: 164709 - DNA, 15 bp, Homo sapiens
tgggacttggtggga

SEQ ID NO: 164710 - DNA, 15 bp, Homo sapiens
gggacttggtgggac

SEQ ID NO: 164711 - DNA, 15 bp, Homo sapiens
ggacttggtgggacg

SEQ ID NO: 164712 - DNA, 15 bp, Homo sapiens
gacttggtgggacga

SEQ ID NO: 164713 - DNA, 15 bp, Homo sapiens
acttggtgggacgaa

SEQ ID NO: 164714 - DNA, 15 bp, Homo sapiens
cttggtgggacgaaa

SEQ ID NO: 164715 - DNA, 15 bp, Homo sapiens
ttggtgggacgaaac

SEQ ID NO: 164716 - DNA, 15 bp, Homo sapiens
tggtgggacgaaacc

SEQ ID NO: 164717 - DNA, 15 bp, Homo sapiens
ggtgggacgaaacct

SEQ ID NO: 164718 - DNA, 15 bp, Homo sapiens
gtgggacgaaacctc

SEQ ID NO: 164719 - DNA, 15 bp, Homo sapiens
tgggacgaaacctct

SEQ ID NO: 164720 - DNA, 15 bp, Homo sapiens
gggacgaaacctctt

SEQ ID NO: 164721 - DNA, 15 bp, Homo sapiens
ggacgaaacctcttc

SEQ ID NO: 164722 - DNA, 15 bp, Homo sapiens
gacgaaacctcttcg

SEQ ID NO: 164723 - DNA, 15 bp, Homo sapiens
acgaaacctcttcgc

SEQ ID NO: 164724 - DNA, 15 bp, Homo sapiens
cgaaacctcttcgcc

SEQ ID NO: 164725 - DNA, 15 bp, Homo sapiens
gaaacctcttcgcca

SEQ ID NO: 164726 - DNA, 15 bp, Homo sapiens
aaacctcttcgccat

SEQ ID NO: 164727 - DNA, 15 bp, Homo sapiens
aacctcttcgccatg

SEQ ID NO: 164728 - DNA, 15 bp, Homo sapiens
acctcttcgccatgg

SEQ ID NO: 164729 - DNA, 15 bp, Homo sapiens
cctcttcgccatggc

SEQ ID NO: 164730 - DNA, 15 bp, Homo sapiens
ctcttcgccatggcc

SEQ ID NO: 164731 - DNA, 15 bp, Homo sapiens
tcttcgccatggccg

SEQ ID NO: 164732 - DNA, 15 bp, Homo sapiens
cttcgccatggccgt

SEQ ID NO: 164733 - DNA, 15 bp, Homo sapiens
ttcgccatggccgtg

SEQ ID NO: 164734 - DNA, 15 bp, Homo sapiens
tcgccatggccgtgg

SEQ ID NO: 164735 - DNA, 15 bp, Homo sapiens
cgccatggccgtgga

SEQ ID NO: 164736 - DNA, 15 bp, Homo sapiens
gccatggccgtggaa

SEQ ID NO: 164737 - DNA, 15 bp, Homo sapiens
ccatggccgtggaag

SEQ ID NO: 164738 - DNA, 15 bp, Homo sapiens
catggccgtggaagg

SEQ ID NO: 164739 - DNA, 15 bp, Homo sapiens
atggccgtggaaggg

SEQ ID NO: 164740 - DNA, 15 bp, Homo sapiens
tggccgtggaagggg

SEQ ID NO: 164741 - DNA, 15 bp, Homo sapiens
ggccgtggaaggggt

SEQ ID NO: 164742 - DNA, 15 bp, Homo sapiens
gccgtggaaggggtg

SEQ ID NO: 164743 - DNA, 15 bp, Homo sapiens
ccgtggaaggggtgg

SEQ ID NO: 164744 - DNA, 15 bp, Homo sapiens
cgtggaaggggtggt

SEQ ID NO: 164745 - DNA, 15 bp, Homo sapiens
gtggaaggggtggtg

SEQ ID NO: 164746 - DNA, 15 bp, Homo sapiens
tggaaggggtggtgt

SEQ ID NO: 164747 - DNA, 15 bp, Homo sapiens
ggaaggggtggtgtt

SEQ ID NO: 164748 - DNA, 15 bp, Homo sapiens
gaaggggtggtgttc

SEQ ID NO: 164749 - DNA, 15 bp, Homo sapiens
aaggggtggtgttct

SEQ ID NO: 164750 - DNA, 15 bp, Homo sapiens
aggggtggtgttctt

SEQ ID NO: 164751 - DNA, 15 bp, Homo sapiens
ggggtggtgttcttc

SEQ ID NO: 164752 - DNA, 15 bp, Homo sapiens
gggtggtgttcttcc

SEQ ID NO: 164753 - DNA, 15 bp, Homo sapiens
ggtggtgttcttcct

SEQ ID NO: 164754 - DNA, 15 bp, Homo sapiens
gtggtgttcttcctc

SEQ ID NO: 164755 - DNA, 15 bp, Homo sapiens
tggtgttcttcctca

SEQ ID NO: 164756 - DNA, 15 bp, Homo sapiens
ggtgttcttcctcat

SEQ ID NO: 164757 - DNA, 15 bp, Homo sapiens
gtgttcttcctcatt

SEQ ID NO: 164758 - DNA, 15 bp, Homo sapiens
tgttcttcctcatta

SEQ ID NO: 164759 - DNA, 15 bp, Homo sapiens
gttcttcctcattac

SEQ ID NO: 164760 - DNA, 15 bp, Homo sapiens
ttcttcctcattact

SEQ ID NO: 164761 - DNA, 15 bp, Homo sapiens
tcttcctcattactg

SEQ ID NO: 164762 - DNA, 15 bp, Homo sapiens
cttcctcattactgt

SEQ ID NO: 164763 - DNA, 15 bp, Homo sapiens
ttcctcattactgtt

SEQ ID NO: 164764 - DNA, 15 bp, Homo sapiens
tcctcattactgttc

SEQ ID NO: 164765 - DNA, 15 bp, Homo sapiens
cctcattactgttct

SEQ ID NO: 164766 - DNA, 15 bp, Homo sapiens
ctcattactgttctg

SEQ ID NO: 164767 - DNA, 15 bp, Homo sapiens
tcattactgttctga

SEQ ID NO: 164768 - DNA, 15 bp, Homo sapiens
cattactgttctgat

SEQ ID NO: 164769 - DNA, 15 bp, Homo sapiens
attactgttctgatc

SEQ ID NO: 164770 - DNA, 15 bp, Homo sapiens
ttactgttctgatcc

SEQ ID NO: 164771 - DNA, 15 bp, Homo sapiens
tactgttctgatcca

SEQ ID NO: 164772 - DNA, 15 bp, Homo sapiens
actgttctgatccag

SEQ ID NO: 164773 - DNA, 15 bp, Homo sapiens
ctgttctgatccagt

SEQ ID NO: 164774 - DNA, 15 bp, Homo sapiens
tgttctgatccagta

SEQ ID NO: 164775 - DNA, 15 bp, Homo sapiens
gttctgatccagtac

SEQ ID NO: 164776 - DNA, 15 bp, Homo sapiens
ttctgatccagtaca

SEQ ID NO: 164777 - DNA, 15 bp, Homo sapiens
tctgatccagtacag

SEQ ID NO: 164778 - DNA, 15 bp, Homo sapiens
ctgatccagtacaga

SEQ ID NO: 164779 - DNA, 15 bp, Homo sapiens
tgatccagtacagat

SEQ ID NO: 164780 - DNA, 15 bp, Homo sapiens
gatccagtacagatt

SEQ ID NO: 164781 - DNA, 15 bp, Homo sapiens
atccagtacagattc

SEQ ID NO: 164782 - DNA, 15 bp, Homo sapiens
tccagtacagattct

SEQ ID NO: 164783 - DNA, 15 bp, Homo sapiens
ccagtacagattctt

SEQ ID NO: 164784 - DNA, 15 bp, Homo sapiens
cagtacagattcttc

SEQ ID NO: 164785 - DNA, 15 bp, Homo sapiens
agtacagattcttca

SEQ ID NO: 164786 - DNA, 15 bp, Homo sapiens
gtacagattcttcat

SEQ ID NO: 164787 - DNA, 15 bp, Homo sapiens
tacagattcttcatc

SEQ ID NO: 164788 - DNA, 15 bp, Homo sapiens
acagattcttcatca

SEQ ID NO: 164789 - DNA, 15 bp, Homo sapiens
cagattcttcatcag

SEQ ID NO: 164790 - DNA, 15 bp, Homo sapiens
agattcttcatcagg

SEQ ID NO: 164791 - DNA, 15 bp, Homo sapiens
gattcttcatcaggc

SEQ ID NO: 164792 - DNA, 15 bp, Homo sapiens
attcttcatcaggcc

SEQ ID NO: 164793 - DNA, 15 bp, Homo sapiens
ttcttcatcaggccc

SEQ ID NO: 164794 - DNA, 15 bp, Homo sapiens
tcttcatcaggccca

SEQ ID NO: 164795 - DNA, 15 bp, Homo sapiens
cttcatcaggcccag

SEQ ID NO: 164796 - DNA, 15 bp, Homo sapiens
ttcatcaggcccagg

SEQ ID NO: 164797 - DNA, 15 bp, Homo sapiens
tcatcaggcccaggt

SEQ ID NO: 164798 - DNA, 15 bp, Homo sapiens
catcaggcccaggtg

SEQ ID NO: 164799 - DNA, 15 bp, Homo sapiens
atcaggcccaggtga

SEQ ID NO: 164800 - DNA, 15 bp, Homo sapiens
tcaggcccaggtgag

SEQ ID NO: 164801 - DNA, 15 bp, Homo sapiens
caggcccaggtgagc

SEQ ID NO: 164802 - DNA, 15 bp, Homo sapiens
aggcccaggtgagct

SEQ ID NO: 164803 - DNA, 15 bp, Homo sapiens
ggcccaggtgagctt

SEQ ID NO: 164804 - DNA, 15 bp, Homo sapiens
gcccaggtgagcttt

SEQ ID NO: 164805 - DNA, 15 bp, Homo sapiens
cccaggtgagctttt

SEQ ID NO: 164806 - DNA, 15 bp, Homo sapiens
ccaggtgagcttttt

SEQ ID NO: 164807 - DNA, 15 bp, Homo sapiens
caggtgagctttttc

SEQ ID NO: 164808 - DNA, 15 bp, Homo sapiens
aggtgagctttttct

SEQ ID NO: 164809 - DNA, 15 bp, Homo sapiens
ggtgagctttttctt

SEQ ID NO: 164810 - DNA, 15 bp, Homo sapiens
gtgagctttttctta

SEQ ID NO: 164811 - DNA, 15 bp, Homo sapiens
tgagctttttcttag

SEQ ID NO: 164812 - DNA, 15 bp, Homo sapiens
gagctttttcttaga

SEQ ID NO: 164813 - DNA, 15 bp, Homo sapiens
agctttttcttagaa

SEQ ID NO: 164814 - DNA, 15 bp, Homo sapiens
gctttttcttagaac

SEQ ID NO: 164815 - DNA, 15 bp, Homo sapiens
ctttttcttagaacc

SEQ ID NO: 164816 - DNA, 15 bp, Homo sapiens
tttttcttagaaccc

SEQ ID NO: 164817 - DNA, 15 bp, Homo sapiens
ttttcttagaacccg

SEQ ID NO: 164818 - DNA, 15 bp, Homo sapiens
tttcttagaacccgt

SEQ ID NO: 164819 - DNA, 15 bp, Homo sapiens
ttcttagaacccgtg

SEQ ID NO: 164820 - DNA, 15 bp, Homo sapiens
tcttagaacccgtgg

SEQ ID NO: 164821 - DNA, 15 bp, Homo sapiens
cttagaacccgtgga

SEQ ID NO: 164822 - DNA, 15 bp, Homo sapiens
ttagaacccgtggag

SEQ ID NO: 164823 - DNA, 15 bp, Homo sapiens
tagaacccgtggagc

SEQ ID NO: 164824 - DNA, 15 bp, Homo sapiens
agaacccgtggagca

SEQ ID NO: 164825 - DNA, 15 bp, Homo sapiens
gaacccgtggagcac

SEQ ID NO: 164826 - DNA, 15 bp, Homo sapiens
aacccgtggagcacc

SEQ ID NO: 164827 - DNA, 15 bp, Homo sapiens
acccgtggagcacct

SEQ ID NO: 164828 - DNA, 15 bp, Homo sapiens
cccgtggagcacctg

SEQ ID NO: 164829 - DNA, 15 bp, Homo sapiens
ccgtggagcacctgg

SEQ ID NO: 164830 - DNA, 15 bp, Homo sapiens
cgtggagcacctggt

SEQ ID NO: 164831 - DNA, 15 bp, Homo sapiens
gtggagcacctggtt

SEQ ID NO: 164832 - DNA, 15 bp, Homo sapiens
tggagcacctggttg

SEQ ID NO: 164833 - DNA, 15 bp, Homo sapiens
ggagcacctggttga

SEQ ID NO: 164834 - DNA, 15 bp, Homo sapiens
gagcacctggttgag

SEQ ID NO: 164835 - DNA, 15 bp, Homo sapiens
agcacctggttgagg

SEQ ID NO: 164836 - DNA, 15 bp, Homo sapiens
gcacctggttgaggg

SEQ ID NO: 164837 - DNA, 15 bp, Homo sapiens
cacctggttgagggt

SEQ ID NO: 164838 - DNA, 15 bp, Homo sapiens
acctggttgagggtc

SEQ ID NO: 164839 - DNA, 15 bp, Homo sapiens
cctggttgagggtca

SEQ ID NO: 164840 - DNA, 15 bp, Homo sapiens
ctggttgagggtcac

SEQ ID NO: 164841 - DNA, 15 bp, Homo sapiens
tggttgagggtcaca

SEQ ID NO: 164842 - DNA, 15 bp, Homo sapiens
ggttgagggtcacag

SEQ ID NO: 164843 - DNA, 15 bp, Homo sapiens
gttgagggtcacaga

SEQ ID NO: 164844 - DNA, 15 bp, Homo sapiens
ttgagggtcacagag

SEQ ID NO: 164845 - DNA, 15 bp, Homo sapiens
tgagggtcacagagg

SEQ ID NO: 164846 - DNA, 15 bp, Homo sapiens
gagggtcacagagga

SEQ ID NO: 164847 - DNA, 15 bp, Homo sapiens
agggtcacagaggag

SEQ ID NO: 164848 - DNA, 15 bp, Homo sapiens
gggtcacagaggagg

SEQ ID NO: 164849 - DNA, 15 bp, Homo sapiens
ggtcacagaggaggc

SEQ ID NO: 164850 - DNA, 15 bp, Homo sapiens
gtcacagaggaggcg

SEQ ID NO: 164851 - DNA, 15 bp, Homo sapiens
tcacagaggaggcgc

SEQ ID NO: 164852 - DNA, 15 bp, Homo sapiens
cacagaggaggcgca

SEQ ID NO: 164853 - DNA, 15 bp, Homo sapiens
acagaggaggcgcac

SEQ ID NO: 164854 - DNA, 15 bp, Homo sapiens
cagaggaggcgcaca

SEQ ID NO: 164855 - DNA, 15 bp, Homo sapiens
agaggaggcgcacag

SEQ ID NO: 164856 - DNA, 15 bp, Homo sapiens
gaggaggcgcacagg

SEQ ID NO: 164857 - DNA, 15 bp, Homo sapiens
aggaggcgcacaggg

SEQ ID NO: 164858 - DNA, 15 bp, Homo sapiens
ggaggcgcacaggga

SEQ ID NO: 164859 - DNA, 15 bp, Homo sapiens
gaggcgcacagggaa

SEQ ID NO: 164860 - DNA, 15 bp, Homo sapiens
aggcgcacagggaaa

SEQ ID NO: 164861 - DNA, 15 bp, Homo sapiens
ggcgcacagggaaac

SEQ ID NO: 164862 - DNA, 15 bp, Homo sapiens
gcgcacagggaaaca

SEQ ID NO: 164863 - DNA, 15 bp, Homo sapiens
cgcacagggaaacac

SEQ ID NO: 164864 - DNA, 15 bp, Homo sapiens
gcacagggaaacact

SEQ ID NO: 164865 - DNA, 15 bp, Homo sapiens
cacagggaaacactc

SEQ ID NO: 164866 - DNA, 15 bp, Homo sapiens
acagggaaacactca

SEQ ID NO: 164867 - DNA, 15 bp, Homo sapiens
cagggaaacactcac

SEQ ID NO: 164868 - DNA, 15 bp, Homo sapiens
agggaaacactcacc

SEQ ID NO: 164869 - DNA, 15 bp, Homo sapiens
gggaaacactcacca

SEQ ID NO: 164870 - DNA, 15 bp, Homo sapiens
ggaaacactcaccaa

SEQ ID NO: 164871 - DNA, 15 bp, Homo sapiens
gaaacactcaccaat

SEQ ID NO: 164872 - DNA, 15 bp, Homo sapiens
aaacactcaccaatg

SEQ ID NO: 164873 - DNA, 15 bp, Homo sapiens
aacactcaccaatgg

SEQ ID NO: 164874 - DNA, 15 bp, Homo sapiens
acactcaccaatggg

SEQ ID NO: 164875 - DNA, 15 bp, Homo sapiens
cactcaccaatgggg

SEQ ID NO: 164876 - DNA, 15 bp, Homo sapiens
actcaccaatggggg

SEQ ID NO: 164877 - DNA, 15 bp, Homo sapiens
ctcaccaatgggggt

SEQ ID NO: 164878 - DNA, 15 bp, Homo sapiens
tcaccaatgggggtt

SEQ ID NO: 164879 - DNA, 15 bp, Homo sapiens
caccaatgggggttg

SEQ ID NO: 164880 - DNA, 15 bp, Homo sapiens
accaatgggggttgc

SEQ ID NO: 164881 - DNA, 15 bp, Homo sapiens
ccaatgggggttgca

SEQ ID NO: 164882 - DNA, 15 bp, Homo sapiens
caatgggggttgcat

SEQ ID NO: 164883 - DNA, 15 bp, Homo sapiens
aatgggggttgcatt

SEQ ID NO: 164884 - DNA, 15 bp, Homo sapiens
atgggggttgcattg

SEQ ID NO: 164885 - DNA, 15 bp, Homo sapiens
tgggggttgcattga

SEQ ID NO: 164886 - DNA, 15 bp, Homo sapiens
gggggttgcattgaa

SEQ ID NO: 164887 - DNA, 15 bp, Homo sapiens
ggggttgcattgaac

SEQ ID NO: 164888 - DNA, 15 bp, Homo sapiens
gggttgcattgaact

SEQ ID NO: 164889 - DNA, 15 bp, Homo sapiens
ggttgcattgaactg

SEQ ID NO: 164890 - DNA, 15 bp, Homo sapiens
gttgcattgaactga

SEQ ID NO: 164891 - DNA, 15 bp, Homo sapiens
ttgcattgaactgaa

SEQ ID NO: 164892 - DNA, 15 bp, Homo sapiens
tgcattgaactgaac

SEQ ID NO: 164893 - DNA, 15 bp, Homo sapiens
gcattgaactgaact

SEQ ID NO: 164894 - DNA, 15 bp, Homo sapiens
cattgaactgaactc

SEQ ID NO: 164895 - DNA, 15 bp, Homo sapiens
attgaactgaactca

SEQ ID NO: 164896 - DNA, 15 bp, Homo sapiens
ttgaactgaactcaa

SEQ ID NO: 164897 - DNA, 15 bp, Homo sapiens
tgaactgaactcaaa

SEQ ID NO: 164898 - DNA, 15 bp, Homo sapiens
gaactgaactcaaaa

SEQ ID NO: 164899 - DNA, 15 bp, Homo sapiens
aactgaactcaaaat

SEQ ID NO: 164900 - DNA, 15 bp, Homo sapiens
actgaactcaaaata

SEQ ID NO: 164901 - DNA, 15 bp, Homo sapiens
ctgaactcaaaatat

SEQ ID NO: 164902 - DNA, 15 bp, Homo sapiens
tgaactcaaaatatg

SEQ ID NO: 164903 - DNA, 15 bp, Homo sapiens
gaactcaaaatatgt

SEQ ID NO: 164904 - DNA, 15 bp, Homo sapiens
aactcaaaatatgtg

SEQ ID NO: 164905 - DNA, 15 bp, Homo sapiens
actcaaaatatgtga

SEQ ID NO: 164906 - DNA, 15 bp, Homo sapiens
ctcaaaatatgtgat

SEQ ID NO: 164907 - DNA, 15 bp, Homo sapiens
tcaaaatatgtgata

SEQ ID NO: 164908 - DNA, 15 bp, Homo sapiens
caaaatatgtgataa

SEQ ID NO: 164909 - DNA, 15 bp, Homo sapiens
aaaatatgtgataaa

SEQ ID NO: 164910 - DNA, 15 bp, Homo sapiens
aaatatgtgataaaa

SEQ ID NO: 164911 - DNA, 15 bp, Homo sapiens
aatatgtgataaaac

SEQ ID NO: 164912 - DNA, 15 bp, Homo sapiens
atatgtgataaaact

SEQ ID NO: 164913 - DNA, 15 bp, Homo sapiens
tatgtgataaaactg

SEQ ID NO: 164914 - DNA, 15 bp, Homo sapiens
atgtgataaaactga

SEQ ID NO: 164915 - DNA, 15 bp, Homo sapiens
tgtgataaaactgat

SEQ ID NO: 164916 - DNA, 15 bp, Homo sapiens
gtgataaaactgatt

SEQ ID NO: 164917 - DNA, 15 bp, Homo sapiens
tgataaaactgattt

SEQ ID NO: 164918 - DNA, 15 bp, Homo sapiens
gataaaactgatttt

SEQ ID NO: 164919 - DNA, 15 bp, Homo sapiens
ataaaactgattttc

SEQ ID NO: 164920 - DNA, 15 bp, Homo sapiens
taaaactgattttcc

SEQ ID NO: 164921 - DNA, 15 bp, Homo sapiens
aaaactgattttcct

SEQ ID NO: 164922 - DNA, 15 bp, Homo sapiens
aaactgattttcctg

SEQ ID NO: 164923 - DNA, 15 bp, Homo sapiens
aactgattttcctga

SEQ ID NO: 164924 - DNA, 15 bp, Homo sapiens
actgattttcctgat

SEQ ID NO: 164925 - DNA, 15 bp, Homo sapiens
ctgattttcctgatg

SEQ ID NO: 164926 - DNA, 15 bp, Homo sapiens
tgattttcctgatgt

SEQ ID NO: 164927 - DNA, 15 bp, Homo sapiens
gattttcctgatgtg

SEQ ID NO: 164928 - DNA, 15 bp, Homo sapiens
attttcctgatgtgg

SEQ ID NO: 164929 - DNA, 15 bp, Homo sapiens
ttttcctgatgtggg

SEQ ID NO: 164930 - DNA, 15 bp, Homo sapiens
tttcctgatgtgggc

SEQ ID NO: 164931 - DNA, 15 bp, Homo sapiens
ttcctgatgtgggca

SEQ ID NO: 164932 - DNA, 15 bp, Homo sapiens
tcctgatgtgggcat

SEQ ID NO: 164933 - DNA, 15 bp, Homo sapiens
cctgatgtgggcatc

SEQ ID NO: 164934 - DNA, 15 bp, Homo sapiens
ctgatgtgggcatcc

SEQ ID NO: 164935 - DNA, 15 bp, Homo sapiens
tgatgtgggcatccc

SEQ ID NO: 164936 - DNA, 15 bp, Homo sapiens
gatgtgggcatcccg

SEQ ID NO: 164937 - DNA, 15 bp, Homo sapiens
atgtgggcatcccgc

SEQ ID NO: 164938 - DNA, 15 bp, Homo sapiens
tgtgggcatcccgca

SEQ ID NO: 164939 - DNA, 15 bp, Homo sapiens
gtgggcatcccgcag

SEQ ID NO: 164940 - DNA, 15 bp, Homo sapiens
tgggcatcccgcagc

SEQ ID NO: 164941 - DNA, 15 bp, Homo sapiens
gggcatcccgcagcc

SEQ ID NO: 164942 - DNA, 15 bp, Homo sapiens
ggcatcccgcagccc

SEQ ID NO: 164943 - DNA, 15 bp, Homo sapiens
gcatcccgcagcccc

SEQ ID NO: 164944 - DNA, 15 bp, Homo sapiens
catcccgcagccccc

SEQ ID NO: 164945 - DNA, 15 bp, Homo sapiens
atcccgcagccccct

SEQ ID NO: 164946 - DNA, 15 bp, Homo sapiens
tcccgcagccccctc

SEQ ID NO: 164947 - DNA, 15 bp, Homo sapiens
cccgcagccccctcc

SEQ ID NO: 164948 - DNA, 15 bp, Homo sapiens
ccgcagccccctccc

SEQ ID NO: 164949 - DNA, 15 bp, Homo sapiens
cgcagccccctccct

SEQ ID NO: 164950 - DNA, 15 bp, Homo sapiens
gcagccccctccctg

SEQ ID NO: 164951 - DNA, 15 bp, Homo sapiens
cagccccctccctgc

SEQ ID NO: 164952 - DNA, 15 bp, Homo sapiens
agccccctccctgcc

SEQ ID NO: 164953 - DNA, 15 bp, Homo sapiens
gccccctccctgccc

SEQ ID NO: 164954 - DNA, 15 bp, Homo sapiens
ccccctccctgccca

SEQ ID NO: 164955 - DNA, 15 bp, Homo sapiens
cccctccctgcccat

SEQ ID NO: 164956 - DNA, 15 bp, Homo sapiens
ccctccctgcccatc

SEQ ID NO: 164957 - DNA, 15 bp, Homo sapiens
cctccctgcccatcc

SEQ ID NO: 164958 - DNA, 15 bp, Homo sapiens
ctccctgcccatcct

SEQ ID NO: 164959 - DNA, 15 bp, Homo sapiens
tccctgcccatcctg

SEQ ID NO: 164960 - DNA, 15 bp, Homo sapiens
ccctgcccatcctgg

SEQ ID NO: 164961 - DNA, 15 bp, Homo sapiens
cctgcccatcctgga

SEQ ID NO: 164962 - DNA, 15 bp, Homo sapiens
ctgcccatcctggag

SEQ ID NO: 164963 - DNA, 15 bp, Homo sapiens
tgcccatcctggaga

SEQ ID NO: 164964 - DNA, 15 bp, Homo sapiens
gcccatcctggagac

SEQ ID NO: 164965 - DNA, 15 bp, Homo sapiens
cccatcctggagact

SEQ ID NO: 164966 - DNA, 15 bp, Homo sapiens
ccatcctggagactg

SEQ ID NO: 164967 - DNA, 15 bp, Homo sapiens
catcctggagactgt

SEQ ID NO: 164968 - DNA, 15 bp, Homo sapiens
atcctggagactgtg

SEQ ID NO: 164969 - DNA, 15 bp, Homo sapiens
tcctggagactgtgg

SEQ ID NO: 164970 - DNA, 15 bp, Homo sapiens
cctggagactgtggc

SEQ ID NO: 164971 - DNA, 15 bp, Homo sapiens
ctggagactgtggca

SEQ ID NO: 164972 - DNA, 15 bp, Homo sapiens
tggagactgtggcaa

SEQ ID NO: 164973 - DNA, 15 bp, Homo sapiens
ggagactgtggcaag

SEQ ID NO: 164974 - DNA, 15 bp, Homo sapiens
gagactgtggcaagt

SEQ ID NO: 164975 - DNA, 15 bp, Homo sapiens
agactgtggcaagta

SEQ ID NO: 164976 - DNA, 15 bp, Homo sapiens
gactgtggcaagtag

SEQ ID NO: 164977 - DNA, 15 bp, Homo sapiens
actgtggcaagtagg

SEQ ID NO: 164978 - DNA, 15 bp, Homo sapiens
ctgtggcaagtaggt

SEQ ID NO: 164979 - DNA, 15 bp, Homo sapiens
tgtggcaagtaggtt

SEQ ID NO: 164980 - DNA, 15 bp, Homo sapiens
gtggcaagtaggttt

SEQ ID NO: 164981 - DNA, 15 bp, Homo sapiens
tggcaagtaggtttt

SEQ ID NO: 164982 - DNA, 15 bp, Homo sapiens
ggcaagtaggtttta

SEQ ID NO: 164983 - DNA, 15 bp, Homo sapiens
gcaagtaggttttat

SEQ ID NO: 164984 - DNA, 15 bp, Homo sapiens
caagtaggttttata

SEQ ID NO: 164985 - DNA, 15 bp, Homo sapiens
aagtaggttttataa

SEQ ID NO: 164986 - DNA, 15 bp, Homo sapiens
agtaggttttataat

SEQ ID NO: 164987 - DNA, 15 bp, Homo sapiens
gtaggttttataata

SEQ ID NO: 164988 - DNA, 15 bp, Homo sapiens
taggttttataatac

SEQ ID NO: 164989 - DNA, 15 bp, Homo sapiens
aggttttataatact

SEQ ID NO: 164990 - DNA, 15 bp, Homo sapiens
ggttttataatacta

SEQ ID NO: 164991 - DNA, 15 bp, Homo sapiens
gttttataatactac

SEQ ID NO: 164992 - DNA, 15 bp, Homo sapiens
ttttataatactacg

SEQ ID NO: 164993 - DNA, 15 bp, Homo sapiens
tttataatactacgt

SEQ ID NO: 164994 - DNA, 15 bp, Homo sapiens
ttataatactacgtt

SEQ ID NO: 164995 - DNA, 15 bp, Homo sapiens
tataatactacgtta

SEQ ID NO: 164996 - DNA, 15 bp, Homo sapiens
ataatactacgttag

SEQ ID NO: 164997 - DNA, 15 bp, Homo sapiens
taatactacgttaga

SEQ ID NO: 164998 - DNA, 15 bp, Homo sapiens
aatactacgttagag

SEQ ID NO: 164999 - DNA, 15 bp, Homo sapiens
atactacgttagaga

SEQ ID NO: 165000 - DNA, 15 bp, Homo sapiens
tactacgttagagac

SEQ ID NO: 165001 - DNA, 15 bp, Homo sapiens
actacgttagagact

SEQ ID NO: 165002 - DNA, 15 bp, Homo sapiens
ctacgttagagactg

SEQ ID NO: 165003 - DNA, 15 bp, Homo sapiens
tacgttagagactga

SEQ ID NO: 165004 - DNA, 15 bp, Homo sapiens
acgttagagactgaa

SEQ ID NO: 165005 - DNA, 15 bp, Homo sapiens
cgttagagactgaat

SEQ ID NO: 165006 - DNA, 15 bp, Homo sapiens
gttagagactgaatc

SEQ ID NO: 165007 - DNA, 15 bp, Homo sapiens
ttagagactgaatct

SEQ ID NO: 165008 - DNA, 15 bp, Homo sapiens
tagagactgaatctt

SEQ ID NO: 165009 - DNA, 15 bp, Homo sapiens
agagactgaatcttt

SEQ ID NO: 165010 - DNA, 15 bp, Homo sapiens
gagactgaatctttg

SEQ ID NO: 165011 - DNA, 15 bp, Homo sapiens
agactgaatctttgt

SEQ ID NO: 165012 - DNA, 15 bp, Homo sapiens
gactgaatctttgtc

SEQ ID NO: 165013 - DNA, 15 bp, Homo sapiens
actgaatctttgtcc

SEQ ID NO: 165014 - DNA, 15 bp, Homo sapiens
ctgaatctttgtcct

SEQ ID NO: 165015 - DNA, 15 bp, Homo sapiens
tgaatctttgtcctg

SEQ ID NO: 165016 - DNA, 15 bp, Homo sapiens
gaatctttgtcctga

SEQ ID NO: 165017 - DNA, 15 bp, Homo sapiens
aatctttgtcctgaa

SEQ ID NO: 165018 - DNA, 15 bp, Homo sapiens
atctttgtcctgaaa

SEQ ID NO: 165019 - DNA, 15 bp, Homo sapiens
tctttgtcctgaaaa

SEQ ID NO: 165020 - DNA, 15 bp, Homo sapiens
ctttgtcctgaaaaa

SEQ ID NO: 165021 - DNA, 15 bp, Homo sapiens
tttgtcctgaaaaat

SEQ ID NO: 165022 - DNA, 15 bp, Homo sapiens
ttgtcctgaaaaata

SEQ ID NO: 165023 - DNA, 15 bp, Homo sapiens
tgtcctgaaaaatag

SEQ ID NO: 165024 - DNA, 15 bp, Homo sapiens
gtcctgaaaaatagt

SEQ ID NO: 165025 - DNA, 15 bp, Homo sapiens
tcctgaaaaatagtt

SEQ ID NO: 165026 - DNA, 15 bp, Homo sapiens
cctgaaaaatagttt

SEQ ID NO: 165027 - DNA, 15 bp, Homo sapiens
ctgaaaaatagtttg

SEQ ID NO: 165028 - DNA, 15 bp, Homo sapiens
tgaaaaatagtttga

SEQ ID NO: 165029 - DNA, 15 bp, Homo sapiens
gaaaaatagtttgaa

SEQ ID NO: 165030 - DNA, 15 bp, Homo sapiens
aaaaatagtttgaaa

SEQ ID NO: 165031 - DNA, 15 bp, Homo sapiens
aaaatagtttgaaag

SEQ ID NO: 165032 - DNA, 15 bp, Homo sapiens
aaatagtttgaaagg

SEQ ID NO: 165033 - DNA, 15 bp, Homo sapiens
aatagtttgaaaggt

SEQ ID NO: 165034 - DNA, 15 bp, Homo sapiens
atagtttgaaaggtt

SEQ ID NO: 165035 - DNA, 15 bp, Homo sapiens
tagtttgaaaggttc

SEQ ID NO: 165036 - DNA, 15 bp, Homo sapiens
agtttgaaaggttca

SEQ ID NO: 165037 - DNA, 15 bp, Homo sapiens
gtttgaaaggttcat

SEQ ID NO: 165038 - DNA, 15 bp, Homo sapiens
tttgaaaggttcatt

SEQ ID NO: 165039 - DNA, 15 bp, Homo sapiens
ttgaaaggttcattt

SEQ ID NO: 165040 - DNA, 15 bp, Homo sapiens
tgaaaggttcatttt

SEQ ID NO: 165041 - DNA, 15 bp, Homo sapiens
gaaaggttcattttt

SEQ ID NO: 165042 - DNA, 15 bp, Homo sapiens
aaaggttcatttttc

SEQ ID NO: 165043 - DNA, 15 bp, Homo sapiens
aaggttcatttttct

SEQ ID NO: 165044 - DNA, 15 bp, Homo sapiens
aggttcatttttctt

SEQ ID NO: 165045 - DNA, 15 bp, Homo sapiens
ggttcatttttcttg

SEQ ID NO: 165046 - DNA, 15 bp, Homo sapiens
gttcatttttcttgt

SEQ ID NO: 165047 - DNA, 15 bp, Homo sapiens
ttcatttttcttgtt

SEQ ID NO: 165048 - DNA, 15 bp, Homo sapiens
tcatttttcttgttt

SEQ ID NO: 165049 - DNA, 15 bp, Homo sapiens
catttttcttgtttt

SEQ ID NO: 165050 - DNA, 15 bp, Homo sapiens
atttttcttgttttt

SEQ ID NO: 165051 - DNA, 15 bp, Homo sapiens
tttttcttgtttttt

SEQ ID NO: 165052 - DNA, 15 bp, Homo sapiens
ttttcttgttttttc

SEQ ID NO: 165053 - DNA, 15 bp, Homo sapiens
tttcttgttttttcc

SEQ ID NO: 165054 - DNA, 15 bp, Homo sapiens
ttcttgttttttccc

SEQ ID NO: 165055 - DNA, 15 bp, Homo sapiens
tcttgttttttcccc

SEQ ID NO: 165056 - DNA, 15 bp, Homo sapiens
cttgttttttccccc

SEQ ID NO: 165057 - DNA, 15 bp, Homo sapiens
ttgttttttccccca

SEQ ID NO: 165058 - DNA, 15 bp, Homo sapiens
tgttttttcccccaa

SEQ ID NO: 165059 - DNA, 15 bp, Homo sapiens
gttttttcccccaag

SEQ ID NO: 165060 - DNA, 15 bp, Homo sapiens
ttttttcccccaaga

SEQ ID NO: 165061 - DNA, 15 bp, Homo sapiens
tttttcccccaagac

SEQ ID NO: 165062 - DNA, 15 bp, Homo sapiens
ttttcccccaagacc

SEQ ID NO: 165063 - DNA, 15 bp, Homo sapiens
tttcccccaagacct

SEQ ID NO: 165064 - DNA, 15 bp, Homo sapiens
ttcccccaagacctg

SEQ ID NO: 165065 - DNA, 15 bp, Homo sapiens
tcccccaagacctgt

SEQ ID NO: 165066 - DNA, 15 bp, Homo sapiens
cccccaagacctgta

SEQ ID NO: 165067 - DNA, 15 bp, Homo sapiens
ccccaagacctgtaa

SEQ ID NO: 165068 - DNA, 15 bp, Homo sapiens
cccaagacctgtaaa

SEQ ID NO: 165069 - DNA, 15 bp, Homo sapiens
ccaagacctgtaaat

SEQ ID NO: 165070 - DNA, 15 bp, Homo sapiens
caagacctgtaaatg

SEQ ID NO: 165071 - DNA, 15 bp, Homo sapiens
aagacctgtaaatgc

SEQ ID NO: 165072 - DNA, 15 bp, Homo sapiens
agacctgtaaatgca

SEQ ID NO: 165073 - DNA, 15 bp, Homo sapiens
gacctgtaaatgcaa

SEQ ID NO: 165074 - DNA, 15 bp, Homo sapiens
acctgtaaatgcaaa

SEQ ID NO: 165075 - DNA, 15 bp, Homo sapiens
cctgtaaatgcaaag

SEQ ID NO: 165076 - DNA, 15 bp, Homo sapiens
ctgtaaatgcaaagc

SEQ ID NO: 165077 - DNA, 15 bp, Homo sapiens
tgtaaatgcaaagct

SEQ ID NO: 165078 - DNA, 15 bp, Homo sapiens
gtaaatgcaaagcta

SEQ ID NO: 165079 - DNA, 15 bp, Homo sapiens
taaatgcaaagctat

SEQ ID NO: 165080 - DNA, 15 bp, Homo sapiens
aaatgcaaagctatc

SEQ ID NO: 165081 - DNA, 15 bp, Homo sapiens
aatgcaaagctatct

SEQ ID NO: 165082 - DNA, 15 bp, Homo sapiens
atgcaaagctatctc

SEQ ID NO: 165083 - DNA, 15 bp, Homo sapiens
tgcaaagctatctcc

SEQ ID NO: 165084 - DNA, 15 bp, Homo sapiens
gcaaagctatctcct

SEQ ID NO: 165085 - DNA, 15 bp, Homo sapiens
caaagctatctcctc

SEQ ID NO: 165086 - DNA, 15 bp, Homo sapiens
aaagctatctcctct

SEQ ID NO: 165087 - DNA, 15 bp, Homo sapiens
aagctatctcctctg

SEQ ID NO: 165088 - DNA, 15 bp, Homo sapiens
agctatctcctctga

SEQ ID NO: 165089 - DNA, 15 bp, Homo sapiens
gctatctcctctgaa

SEQ ID NO: 165090 - DNA, 15 bp, Homo sapiens
ctatctcctctgaat

SEQ ID NO: 165091 - DNA, 15 bp, Homo sapiens
tatctcctctgaatg

SEQ ID NO: 165092 - DNA, 15 bp, Homo sapiens
atctcctctgaatga

SEQ ID NO: 165093 - DNA, 15 bp, Homo sapiens
tctcctctgaatgat

SEQ ID NO: 165094 - DNA, 15 bp, Homo sapiens
ctcctctgaatgatg

SEQ ID NO: 165095 - DNA, 15 bp, Homo sapiens
tcctctgaatgatga

SEQ ID NO: 165096 - DNA, 15 bp, Homo sapiens
cctctgaatgatgaa

SEQ ID NO: 165097 - DNA, 15 bp, Homo sapiens
ctctgaatgatgaag

SEQ ID NO: 165098 - DNA, 15 bp, Homo sapiens
tctgaatgatgaaga

SEQ ID NO: 165099 - DNA, 15 bp, Homo sapiens
ctgaatgatgaagat

SEQ ID NO: 165100 - DNA, 15 bp, Homo sapiens
tgaatgatgaagatg

SEQ ID NO: 165101 - DNA, 15 bp, Homo sapiens
gaatgatgaagatga

SEQ ID NO: 165102 - DNA, 15 bp, Homo sapiens
aatgatgaagatgaa

SEQ ID NO: 165103 - DNA, 15 bp, Homo sapiens
atgatgaagatgaag

SEQ ID NO: 165104 - DNA, 15 bp, Homo sapiens
tgatgaagatgaaga

SEQ ID NO: 165105 - DNA, 15 bp, Homo sapiens
gatgaagatgaagat

SEQ ID NO: 165106 - DNA, 15 bp, Homo sapiens
atgaagatgaagatg

SEQ ID NO: 165107 - DNA, 15 bp, Homo sapiens
tgaagatgaagatgt

SEQ ID NO: 165108 - DNA, 15 bp, Homo sapiens
gaagatgaagatgtg

SEQ ID NO: 165109 - DNA, 15 bp, Homo sapiens
aagatgaagatgtga

SEQ ID NO: 165110 - DNA, 15 bp, Homo sapiens
agatgaagatgtgag

SEQ ID NO: 165111 - DNA, 15 bp, Homo sapiens
gatgaagatgtgagg

SEQ ID NO: 165112 - DNA, 15 bp, Homo sapiens
atgaagatgtgaggc

SEQ ID NO: 165113 - DNA, 15 bp, Homo sapiens
tgaagatgtgaggcg

SEQ ID NO: 165114 - DNA, 15 bp, Homo sapiens
gaagatgtgaggcgg

SEQ ID NO: 165115 - DNA, 15 bp, Homo sapiens
aagatgtgaggcggg

SEQ ID NO: 165116 - DNA, 15 bp, Homo sapiens
agatgtgaggcggga

SEQ ID NO: 165117 - DNA, 15 bp, Homo sapiens
gatgtgaggcgggaa

SEQ ID NO: 165118 - DNA, 15 bp, Homo sapiens
atgtgaggcgggaaa

SEQ ID NO: 165119 - DNA, 15 bp, Homo sapiens
tgtgaggcgggaaag

SEQ ID NO: 165120 - DNA, 15 bp, Homo sapiens
gtgaggcgggaaaga

SEQ ID NO: 165121 - DNA, 15 bp, Homo sapiens
tgaggcgggaaagac

SEQ ID NO: 165122 - DNA, 15 bp, Homo sapiens
gaggcgggaaagaca

SEQ ID NO: 165123 - DNA, 15 bp, Homo sapiens
aggcgggaaagacag

SEQ ID NO: 165124 - DNA, 15 bp, Homo sapiens
ggcgggaaagacaga

SEQ ID NO: 165125 - DNA, 15 bp, Homo sapiens
gcgggaaagacagag

SEQ ID NO: 165126 - DNA, 15 bp, Homo sapiens
cgggaaagacagaga

SEQ ID NO: 165127 - DNA, 15 bp, Homo sapiens
gggaaagacagagaa

SEQ ID NO: 165128 - DNA, 15 bp, Homo sapiens
ggaaagacagagaat

SEQ ID NO: 165129 - DNA, 15 bp, Homo sapiens
gaaagacagagaatt

SEQ ID NO: 165130 - DNA, 15 bp, Homo sapiens
aaagacagagaattc

SEQ ID NO: 165131 - DNA, 15 bp, Homo sapiens
aagacagagaattct

SEQ ID NO: 165132 - DNA, 15 bp, Homo sapiens
agacagagaattctt

SEQ ID NO: 165133 - DNA, 15 bp, Homo sapiens
gacagagaattcttg

SEQ ID NO: 165134 - DNA, 15 bp, Homo sapiens
acagagaattcttga

SEQ ID NO: 165135 - DNA, 15 bp, Homo sapiens
cagagaattcttgat

SEQ ID NO: 165136 - DNA, 15 bp, Homo sapiens
agagaattcttgatg

SEQ ID NO: 165137 - DNA, 15 bp, Homo sapiens
gagaattcttgatgg

SEQ ID NO: 165138 - DNA, 15 bp, Homo sapiens
agaattcttgatggt

SEQ ID NO: 165139 - DNA, 15 bp, Homo sapiens
gaattcttgatggtg

SEQ ID NO: 165140 - DNA, 15 bp, Homo sapiens
aattcttgatggtgg

SEQ ID NO: 165141 - DNA, 15 bp, Homo sapiens
attcttgatggtgga

SEQ ID NO: 165142 - DNA, 15 bp, Homo sapiens
ttcttgatggtggag

SEQ ID NO: 165143 - DNA, 15 bp, Homo sapiens
tcttgatggtggagg

SEQ ID NO: 165144 - DNA, 15 bp, Homo sapiens
cttgatggtggaggc

SEQ ID NO: 165145 - DNA, 15 bp, Homo sapiens
ttgatggtggaggcc

SEQ ID NO: 165146 - DNA, 15 bp, Homo sapiens
tgatggtggaggcca

SEQ ID NO: 165147 - DNA, 15 bp, Homo sapiens
gatggtggaggccag

SEQ ID NO: 165148 - DNA, 15 bp, Homo sapiens
atggtggaggccaga

SEQ ID NO: 165149 - DNA, 15 bp, Homo sapiens
tggtggaggccagaa

SEQ ID NO: 165150 - DNA, 15 bp, Homo sapiens
ggtggaggccagaat

SEQ ID NO: 165151 - DNA, 15 bp, Homo sapiens
gtggaggccagaatg

SEQ ID NO: 165152 - DNA, 15 bp, Homo sapiens
tggaggccagaatga

SEQ ID NO: 165153 - DNA, 15 bp, Homo sapiens
ggaggccagaatgac

SEQ ID NO: 165154 - DNA, 15 bp, Homo sapiens
gaggccagaatgaca

SEQ ID NO: 165155 - DNA, 15 bp, Homo sapiens
aggccagaatgacat

SEQ ID NO: 165156 - DNA, 15 bp, Homo sapiens
ggccagaatgacatc

SEQ ID NO: 165157 - DNA, 15 bp, Homo sapiens
gccagaatgacatct

SEQ ID NO: 165158 - DNA, 15 bp, Homo sapiens
ccagaatgacatctt

SEQ ID NO: 165159 - DNA, 15 bp, Homo sapiens
cagaatgacatctta

SEQ ID NO: 165160 - DNA, 15 bp, Homo sapiens
agaatgacatcttag

SEQ ID NO: 165161 - DNA, 15 bp, Homo sapiens
gaatgacatcttaga

SEQ ID NO: 165162 - DNA, 15 bp, Homo sapiens
aatgacatcttagaa

SEQ ID NO: 165163 - DNA, 15 bp, Homo sapiens
atgacatcttagaaa

SEQ ID NO: 165164 - DNA, 15 bp, Homo sapiens
tgacatcttagaaat

SEQ ID NO: 165165 - DNA, 15 bp, Homo sapiens
gacatcttagaaatc

SEQ ID NO: 165166 - DNA, 15 bp, Homo sapiens
acatcttagaaatca

SEQ ID NO: 165167 - DNA, 15 bp, Homo sapiens
catcttagaaatcaa

SEQ ID NO: 165168 - DNA, 15 bp, Homo sapiens
atcttagaaatcaag

SEQ ID NO: 165169 - DNA, 15 bp, Homo sapiens
tcttagaaatcaagg

SEQ ID NO: 165170 - DNA, 15 bp, Homo sapiens
cttagaaatcaagga

SEQ ID NO: 165171 - DNA, 15 bp, Homo sapiens
ttagaaatcaaggag

SEQ ID NO: 165172 - DNA, 15 bp, Homo sapiens
tagaaatcaaggagt

SEQ ID NO: 165173 - DNA, 15 bp, Homo sapiens
agaaatcaaggagtt

SEQ ID NO: 165174 - DNA, 15 bp, Homo sapiens
gaaatcaaggagttg

SEQ ID NO: 165175 - DNA, 15 bp, Homo sapiens
aaatcaaggagttga

SEQ ID NO: 165176 - DNA, 15 bp, Homo sapiens
aatcaaggagttgac

SEQ ID NO: 165177 - DNA, 15 bp, Homo sapiens
atcaaggagttgacg

SEQ ID NO: 165178 - DNA, 15 bp, Homo sapiens
tcaaggagttgacga

SEQ ID NO: 165179 - DNA, 15 bp, Homo sapiens
caaggagttgacgaa

SEQ ID NO: 165180 - DNA, 15 bp, Homo sapiens
aaggagttgacgaag

SEQ ID NO: 165181 - DNA, 15 bp, Homo sapiens
aggagttgacgaagg

SEQ ID NO: 165182 - DNA, 15 bp, Homo sapiens
ggagttgacgaaggt

SEQ ID NO: 165183 - DNA, 15 bp, Homo sapiens
gagttgacgaaggtg

SEQ ID NO: 165184 - DNA, 15 bp, Homo sapiens
agttgacgaaggtga

SEQ ID NO: 165185 - DNA, 15 bp, Homo sapiens
gttgacgaaggtgag

SEQ ID NO: 165186 - DNA, 15 bp, Homo sapiens
ttgacgaaggtgaga

SEQ ID NO: 165187 - DNA, 15 bp, Homo sapiens
tgacgaaggtgagag

SEQ ID NO: 165188 - DNA, 15 bp, Homo sapiens
gacgaaggtgagaga

SEQ ID NO: 165189 - DNA, 15 bp, Homo sapiens
acgaaggtgagagag

SEQ ID NO: 165190 - DNA, 15 bp, Homo sapiens
cgaaggtgagagagt

SEQ ID NO: 165191 - DNA, 15 bp, Homo sapiens
gaaggtgagagagta

SEQ ID NO: 165192 - DNA, 15 bp, Homo sapiens
aaggtgagagagtac

SEQ ID NO: 165193 - DNA, 15 bp, Homo sapiens
aggtgagagagtaca

SEQ ID NO: 165194 - DNA, 15 bp, Homo sapiens
ggtgagagagtacag

SEQ ID NO: 165195 - DNA, 15 bp, Homo sapiens
gtgagagagtacagg

SEQ ID NO: 165196 - DNA, 15 bp, Homo sapiens
tgagagagtacaggt

SEQ ID NO: 165197 - DNA, 15 bp, Homo sapiens
gagagagtacaggtt

SEQ ID NO: 165198 - DNA, 15 bp, Homo sapiens
agagagtacaggtta

SEQ ID NO: 165199 - DNA, 15 bp, Homo sapiens
gagagtacaggttac

SEQ ID NO: 165200 - DNA, 15 bp, Homo sapiens
agagtacaggttaca

SEQ ID NO: 165201 - DNA, 15 bp, Homo sapiens
gagtacaggttacaa

SEQ ID NO: 165202 - DNA, 15 bp, Homo sapiens
agtacaggttacaat

SEQ ID NO: 165203 - DNA, 15 bp, Homo sapiens
gtacaggttacaata

SEQ ID NO: 165204 - DNA, 15 bp, Homo sapiens
tacaggttacaatag

SEQ ID NO: 165205 - DNA, 15 bp, Homo sapiens
acaggttacaatagc

SEQ ID NO: 165206 - DNA, 15 bp, Homo sapiens
caggttacaatagct

SEQ ID NO: 165207 - DNA, 15 bp, Homo sapiens
aggttacaatagctc

SEQ ID NO: 165208 - DNA, 15 bp, Homo sapiens
ggttacaatagctca

SEQ ID NO: 165209 - DNA, 15 bp, Homo sapiens
gttacaatagctcat

SEQ ID NO: 165210 - DNA, 15 bp, Homo sapiens
ttacaatagctcatc

SEQ ID NO: 165211 - DNA, 15 bp, Homo sapiens
tacaatagctcatct

SEQ ID NO: 165212 - DNA, 15 bp, Homo sapiens
acaatagctcatctt

SEQ ID NO: 165213 - DNA, 15 bp, Homo sapiens
caatagctcatcttc

SEQ ID NO: 165214 - DNA, 15 bp, Homo sapiens
aatagctcatcttca

SEQ ID NO: 165215 - DNA, 15 bp, Homo sapiens
atagctcatcttcag

SEQ ID NO: 165216 - DNA, 15 bp, Homo sapiens
tagctcatcttcagt

SEQ ID NO: 165217 - DNA, 15 bp, Homo sapiens
agctcatcttcagtt

SEQ ID NO: 165218 - DNA, 15 bp, Homo sapiens
gctcatcttcagttt

SEQ ID NO: 165219 - DNA, 15 bp, Homo sapiens
ctcatcttcagtttt

SEQ ID NO: 165220 - DNA, 15 bp, Homo sapiens
tcatcttcagttttt

SEQ ID NO: 165221 - DNA, 15 bp, Homo sapiens
catcttcagtttttt

SEQ ID NO: 165222 - DNA, 15 bp, Homo sapiens
atcttcagttttttt

SEQ ID NO: 165223 - DNA, 15 bp, Homo sapiens
tcttcagtttttttc

SEQ ID NO: 165224 - DNA, 15 bp, Homo sapiens
cttcagtttttttca

SEQ ID NO: 165225 - DNA, 15 bp, Homo sapiens
ttcagtttttttcag

SEQ ID NO: 165226 - DNA, 15 bp, Homo sapiens
tcagtttttttcagc

SEQ ID NO: 165227 - DNA, 15 bp, Homo sapiens
cagtttttttcagct

SEQ ID NO: 165228 - DNA, 15 bp, Homo sapiens
agtttttttcagctt

SEQ ID NO: 165229 - DNA, 15 bp, Homo sapiens
gtttttttcagcttt

SEQ ID NO: 165230 - DNA, 15 bp, Homo sapiens
tttttttcagcttta

SEQ ID NO: 165231 - DNA, 15 bp, Homo sapiens
ttttttcagctttat

SEQ ID NO: 165232 - DNA, 15 bp, Homo sapiens
tttttcagctttatg

SEQ ID NO: 165233 - DNA, 15 bp, Homo sapiens
ttttcagctttatgt

SEQ ID NO: 165234 - DNA, 15 bp, Homo sapiens
tttcagctttatgtg

SEQ ID NO: 165235 - DNA, 15 bp, Homo sapiens
ttcagctttatgtgc

SEQ ID NO: 165236 - DNA, 15 bp, Homo sapiens
tcagctttatgtgct

SEQ ID NO: 165237 - DNA, 15 bp, Homo sapiens
cagctttatgtgctg

SEQ ID NO: 165238 - DNA, 15 bp, Homo sapiens
agctttatgtgctgt

SEQ ID NO: 165239 - DNA, 15 bp, Homo sapiens
gctttatgtgctgta

SEQ ID NO: 165240 - DNA, 15 bp, Homo sapiens
ctttatgtgctgtaa

SEQ ID NO: 165241 - DNA, 15 bp, Homo sapiens
tttatgtgctgtaac

SEQ ID NO: 165242 - DNA, 15 bp, Homo sapiens
ttatgtgctgtaacc

SEQ ID NO: 165243 - DNA, 15 bp, Homo sapiens
tatgtgctgtaaccc

SEQ ID NO: 165244 - DNA, 15 bp, Homo sapiens
atgtgctgtaaccca

SEQ ID NO: 165245 - DNA, 15 bp, Homo sapiens
tgtgctgtaacccag

SEQ ID NO: 165246 - DNA, 15 bp, Homo sapiens
gtgctgtaacccagc

SEQ ID NO: 165247 - DNA, 15 bp, Homo sapiens
tgctgtaacccagca

SEQ ID NO: 165248 - DNA, 15 bp, Homo sapiens
gctgtaacccagcag

SEQ ID NO: 165249 - DNA, 15 bp, Homo sapiens
ctgtaacccagcagt

SEQ ID NO: 165250 - DNA, 15 bp, Homo sapiens
tgtaacccagcagtt

SEQ ID NO: 165251 - DNA, 15 bp, Homo sapiens
gtaacccagcagttt

SEQ ID NO: 165252 - DNA, 15 bp, Homo sapiens
taacccagcagtttg

SEQ ID NO: 165253 - DNA, 15 bp, Homo sapiens
aacccagcagtttgc

SEQ ID NO: 165254 - DNA, 15 bp, Homo sapiens
acccagcagtttgct

SEQ ID NO: 165255 - DNA, 15 bp, Homo sapiens
cccagcagtttgctg

SEQ ID NO: 165256 - DNA, 15 bp, Homo sapiens
ccagcagtttgctga

SEQ ID NO: 165257 - DNA, 15 bp, Homo sapiens
cagcagtttgctgac

SEQ ID NO: 165258 - DNA, 15 bp, Homo sapiens
agcagtttgctgact

SEQ ID NO: 165259 - DNA, 15 bp, Homo sapiens
gcagtttgctgactt

SEQ ID NO: 165260 - DNA, 15 bp, Homo sapiens
cagtttgctgacttg

SEQ ID NO: 165261 - DNA, 15 bp, Homo sapiens
agtttgctgacttgc

SEQ ID NO: 165262 - DNA, 15 bp, Homo sapiens
gtttgctgacttgct

SEQ ID NO: 165263 - DNA, 15 bp, Homo sapiens
tttgctgacttgctt

SEQ ID NO: 165264 - DNA, 15 bp, Homo sapiens
ttgctgacttgctta

SEQ ID NO: 165265 - DNA, 15 bp, Homo sapiens
tgctgacttgcttaa

SEQ ID NO: 165266 - DNA, 15 bp, Homo sapiens
gctgacttgcttaat

SEQ ID NO: 165267 - DNA, 15 bp, Homo sapiens
ctgacttgcttaata

SEQ ID NO: 165268 - DNA, 15 bp, Homo sapiens
tgacttgcttaataa

SEQ ID NO: 165269 - DNA, 15 bp, Homo sapiens
gacttgcttaataaa

SEQ ID NO: 165270 - DNA, 15 bp, Homo sapiens
acttgcttaataaaa

SEQ ID NO: 165271 - DNA, 15 bp, Homo sapiens
cttgcttaataaaag

SEQ ID NO: 165272 - DNA, 15 bp, Homo sapiens
ttgcttaataaaagg

SEQ ID NO: 165273 - DNA, 15 bp, Homo sapiens
tgcttaataaaaggg

SEQ ID NO: 165274 - DNA, 15 bp, Homo sapiens
gcttaataaaagggc

SEQ ID NO: 165275 - DNA, 15 bp, Homo sapiens
cttaataaaagggca

SEQ ID NO: 165276 - DNA, 15 bp, Homo sapiens
ttaataaaagggcat

SEQ ID NO: 165277 - DNA, 15 bp, Homo sapiens
taataaaagggcatg

SEQ ID NO: 165278 - DNA, 15 bp, Homo sapiens
aataaaagggcatgt

SEQ ID NO: 165279 - DNA, 15 bp, Homo sapiens
ataaaagggcatgtg

SEQ ID NO: 165280 - DNA, 15 bp, Homo sapiens
taaaagggcatgtgt

SEQ ID NO: 165281 - DNA, 15 bp, Homo sapiens
aaaagggcatgtgtt

SEQ ID NO: 165282 - DNA, 15 bp, Homo sapiens
aaagggcatgtgttc

SEQ ID NO: 165283 - DNA, 15 bp, Homo sapiens
aagggcatgtgttcc

SEQ ID NO: 165284 - DNA, 15 bp, Homo sapiens
agggcatgtgttccc

SEQ ID NO: 165285 - DNA, 15 bp, Homo sapiens
gggcatgtgttccca

SEQ ID NO: 165286 - DNA, 15 bp, Homo sapiens
ggcatgtgttcccaa

SEQ ID NO: 165287 - DNA, 15 bp, Homo sapiens
gcatgtgttcccaaa

SEQ ID NO: 165288 - DNA, 15 bp, Homo sapiens
catgtgttcccaaaa

SEQ ID NO: 165289 - DNA, 15 bp, Homo sapiens
atgtgttcccaaaat

SEQ ID NO: 165290 - DNA, 15 bp, Homo sapiens
tgtgttcccaaaatg

SEQ ID NO: 165291 - DNA, 15 bp, Homo sapiens
gtgttcccaaaatgt

SEQ ID NO: 165292 - DNA, 15 bp, Homo sapiens
tgttcccaaaatgta

SEQ ID NO: 165293 - DNA, 15 bp, Homo sapiens
gttcccaaaatgtac

SEQ ID NO: 165294 - DNA, 15 bp, Homo sapiens
ttcccaaaatgtaca

SEQ ID NO: 165295 - DNA, 15 bp, Homo sapiens
tcccaaaatgtacat

SEQ ID NO: 165296 - DNA, 15 bp, Homo sapiens
cccaaaatgtacatc

SEQ ID NO: 165297 - DNA, 15 bp, Homo sapiens
ccaaaatgtacatct

SEQ ID NO: 165298 - DNA, 15 bp, Homo sapiens
caaaatgtacatcta

SEQ ID NO: 165299 - DNA, 15 bp, Homo sapiens
aaaatgtacatctat

SEQ ID NO: 165300 - DNA, 15 bp, Homo sapiens
aaatgtacatctata

SEQ ID NO: 165301 - DNA, 15 bp, Homo sapiens
aatgtacatctatac

SEQ ID NO: 165302 - DNA, 15 bp, Homo sapiens
atgtacatctatacc

SEQ ID NO: 165303 - DNA, 15 bp, Homo sapiens
tgtacatctatacca

SEQ ID NO: 165304 - DNA, 15 bp, Homo sapiens
gtacatctataccaa

SEQ ID NO: 165305 - DNA, 15 bp, Homo sapiens
tacatctataccaag

SEQ ID NO: 165306 - DNA, 15 bp, Homo sapiens
acatctataccaagg

SEQ ID NO: 165307 - DNA, 15 bp, Homo sapiens
catctataccaaggt

SEQ ID NO: 165308 - DNA, 15 bp, Homo sapiens
atctataccaaggtt

SEQ ID NO: 165309 - DNA, 15 bp, Homo sapiens
tctataccaaggttc

SEQ ID NO: 165310 - DNA, 15 bp, Homo sapiens
ctataccaaggttct

SEQ ID NO: 165311 - DNA, 15 bp, Homo sapiens
tataccaaggttctg

SEQ ID NO: 165312 - DNA, 15 bp, Homo sapiens
ataccaaggttctgt

SEQ ID NO: 165313 - DNA, 15 bp, Homo sapiens
taccaaggttctgtc

SEQ ID NO: 165314 - DNA, 15 bp, Homo sapiens
accaaggttctgtca

SEQ ID NO: 165315 - DNA, 15 bp, Homo sapiens
ccaaggttctgtcaa

SEQ ID NO: 165316 - DNA, 15 bp, Homo sapiens
caaggttctgtcaat

SEQ ID NO: 165317 - DNA, 15 bp, Homo sapiens
aaggttctgtcaatt

SEQ ID NO: 165318 - DNA, 15 bp, Homo sapiens
aggttctgtcaattt

SEQ ID NO: 165319 - DNA, 15 bp, Homo sapiens
ggttctgtcaatttt

SEQ ID NO: 165320 - DNA, 15 bp, Homo sapiens
gttctgtcaatttta

SEQ ID NO: 165321 - DNA, 15 bp, Homo sapiens
ttctgtcaattttat

SEQ ID NO: 165322 - DNA, 15 bp, Homo sapiens
tctgtcaattttatt

SEQ ID NO: 165323 - DNA, 15 bp, Homo sapiens
ctgtcaattttattt

SEQ ID NO: 165324 - DNA, 15 bp, Homo sapiens
tgtcaattttatttt

SEQ ID NO: 165325 - DNA, 15 bp, Homo sapiens
gtcaattttatttta

SEQ ID NO: 165326 - DNA, 15 bp, Homo sapiens
caattttattttaaa

SEQ ID NO: 165327 - DNA, 15 bp, Homo sapiens
aattttattttaaaa

SEQ ID NO: 165328 - DNA, 15 bp, Homo sapiens
attttattttaaaaa

SEQ ID NO: 165329 - DNA, 15 bp, Homo sapiens
ttttattttaaaaac

SEQ ID NO: 165330 - DNA, 15 bp, Homo sapiens
tttattttaaaaaca

SEQ ID NO: 165331 - DNA, 15 bp, Homo sapiens
ttattttaaaaacac

SEQ ID NO: 165332 - DNA, 15 bp, Homo sapiens
tattttaaaaacacc

SEQ ID NO: 165333 - DNA, 15 bp, Homo sapiens
attttaaaaacacca

SEQ ID NO: 165334 - DNA, 15 bp, Homo sapiens
ttttaaaaacaccat

SEQ ID NO: 165335 - DNA, 15 bp, Homo sapiens
tttaaaaacaccatg

SEQ ID NO: 165336 - DNA, 15 bp, Homo sapiens
ttaaaaacaccatgg

SEQ ID NO: 165337 - DNA, 15 bp, Homo sapiens
taaaaacaccatgga

SEQ ID NO: 165338 - DNA, 15 bp, Homo sapiens
aaaaacaccatggag

SEQ ID NO: 165339 - DNA, 15 bp, Homo sapiens
aaaacaccatggaga

SEQ ID NO: 165340 - DNA, 15 bp, Homo sapiens
aaacaccatggagac

SEQ ID NO: 165341 - DNA, 15 bp, Homo sapiens
aacaccatggagact

SEQ ID NO: 165342 - DNA, 15 bp, Homo sapiens
acaccatggagactt

SEQ ID NO: 165343 - DNA, 15 bp, Homo sapiens
caccatggagacttc

SEQ ID NO: 165344 - DNA, 15 bp, Homo sapiens
accatggagacttct

SEQ ID NO: 165345 - DNA, 15 bp, Homo sapiens
ccatggagacttctt

SEQ ID NO: 165346 - DNA, 15 bp, Homo sapiens
catggagacttctta

SEQ ID NO: 165347 - DNA, 15 bp, Homo sapiens
atggagacttcttaa

SEQ ID NO: 165348 - DNA, 15 bp, Homo sapiens
tggagacttcttaaa

SEQ ID NO: 165349 - DNA, 15 bp, Homo sapiens
ggagacttcttaaag

SEQ ID NO: 165350 - DNA, 15 bp, Homo sapiens
gagacttcttaaaga

SEQ ID NO: 165351 - DNA, 15 bp, Homo sapiens
agacttcttaaagaa

SEQ ID NO: 165352 - DNA, 15 bp, Homo sapiens
gacttcttaaagaat

SEQ ID NO: 165353 - DNA, 15 bp, Homo sapiens
acttcttaaagaatt

SEQ ID NO: 165354 - DNA, 15 bp, Homo sapiens
cttcttaaagaattc

SEQ ID NO: 165355 - DNA, 15 bp, Homo sapiens
ttcttaaagaattct

SEQ ID NO: 165356 - DNA, 15 bp, Homo sapiens
tcttaaagaattctt

SEQ ID NO: 165357 - DNA, 15 bp, Homo sapiens
cttaaagaattctta

SEQ ID NO: 165358 - DNA, 15 bp, Homo sapiens
ttaaagaattcttac

SEQ ID NO: 165359 - DNA, 15 bp, Homo sapiens
taaagaattcttact

SEQ ID NO: 165360 - DNA, 15 bp, Homo sapiens
aaagaattcttactg

SEQ ID NO: 165361 - DNA, 15 bp, Homo sapiens
aagaattcttactga

SEQ ID NO: 165362 - DNA, 15 bp, Homo sapiens
agaattcttactgag

SEQ ID NO: 165363 - DNA, 15 bp, Homo sapiens
gaattcttactgaga

SEQ ID NO: 165364 - DNA, 15 bp, Homo sapiens
aattcttactgagaa

SEQ ID NO: 165365 - DNA, 15 bp, Homo sapiens
attcttactgagaat

SEQ ID NO: 165366 - DNA, 15 bp, Homo sapiens
ttcttactgagaatt

SEQ ID NO: 165367 - DNA, 15 bp, Homo sapiens
tcttactgagaattc

SEQ ID NO: 165368 - DNA, 15 bp, Homo sapiens
cttactgagaattct

SEQ ID NO: 165369 - DNA, 15 bp, Homo sapiens
ttactgagaattctt

SEQ ID NO: 165370 - DNA, 15 bp, Homo sapiens
tactgagaattcttt

SEQ ID NO: 165371 - DNA, 15 bp, Homo sapiens
actgagaattctttt

SEQ ID NO: 165372 - DNA, 15 bp, Homo sapiens
ctgagaattcttttg

SEQ ID NO: 165373 - DNA, 15 bp, Homo sapiens
tgagaattcttttgt

SEQ ID NO: 165374 - DNA, 15 bp, Homo sapiens
gagaattcttttgtg

SEQ ID NO: 165375 - DNA, 15 bp, Homo sapiens
agaattcttttgtga

SEQ ID NO: 165376 - DNA, 15 bp, Homo sapiens
gaattcttttgtgat

SEQ ID NO: 165377 - DNA, 15 bp, Homo sapiens
aattcttttgtgata

SEQ ID NO: 165378 - DNA, 15 bp, Homo sapiens
attcttttgtgatat

SEQ ID NO: 165379 - DNA, 15 bp, Homo sapiens
ttcttttgtgatatg

SEQ ID NO: 165380 - DNA, 15 bp, Homo sapiens
tcttttgtgatatga

SEQ ID NO: 165381 - DNA, 15 bp, Homo sapiens
cttttgtgatatgaa

SEQ ID NO: 165382 - DNA, 15 bp, Homo sapiens
ttttgtgatatgaat

SEQ ID NO: 165383 - DNA, 15 bp, Homo sapiens
tttgtgatatgaatt

SEQ ID NO: 165384 - DNA, 15 bp, Homo sapiens
ttgtgatatgaattc

SEQ ID NO: 165385 - DNA, 15 bp, Homo sapiens
tgtgatatgaattcc

SEQ ID NO: 165386 - DNA, 15 bp, Homo sapiens
gtgatatgaattccc

SEQ ID NO: 165387 - DNA, 15 bp, Homo sapiens
tgatatgaattccca

SEQ ID NO: 165388 - DNA, 15 bp, Homo sapiens
gatatgaattcccat

SEQ ID NO: 165389 - DNA, 15 bp, Homo sapiens
atatgaattcccatt

SEQ ID NO: 165390 - DNA, 15 bp, Homo sapiens
tatgaattcccattc

SEQ ID NO: 165391 - DNA, 15 bp, Homo sapiens
atgaattcccattct

SEQ ID NO: 165392 - DNA, 15 bp, Homo sapiens
tgaattcccattctc

SEQ ID NO: 165393 - DNA, 15 bp, Homo sapiens
gaattcccattctcg

SEQ ID NO: 165394 - DNA, 15 bp, Homo sapiens
aattcccattctcga

SEQ ID NO: 165395 - DNA, 15 bp, Homo sapiens
attcccattctcgaa

SEQ ID NO: 165396 - DNA, 15 bp, Homo sapiens
ttcccattctcgaat

SEQ ID NO: 165397 - DNA, 15 bp, Homo sapiens
tcccattctcgaata

SEQ ID NO: 165398 - DNA, 15 bp, Homo sapiens
cccattctcgaatac

SEQ ID NO: 165399 - DNA, 15 bp, Homo sapiens
ccattctcgaataca

SEQ ID NO: 165400 - DNA, 15 bp, Homo sapiens
cattctcgaatacat

SEQ ID NO: 165401 - DNA, 15 bp, Homo sapiens
attctcgaatacatt

SEQ ID NO: 165402 - DNA, 15 bp, Homo sapiens
ttctcgaatacattg

SEQ ID NO: 165403 - DNA, 15 bp, Homo sapiens
tctcgaatacattgg

SEQ ID NO: 165404 - DNA, 15 bp, Homo sapiens
ctcgaatacattggt

SEQ ID NO: 165405 - DNA, 15 bp, Homo sapiens
tcgaatacattggtt

SEQ ID NO: 165406 - DNA, 15 bp, Homo sapiens
cgaatacattggttt

SEQ ID NO: 165407 - DNA, 15 bp, Homo sapiens
gaatacattggtttt

SEQ ID NO: 165408 - DNA, 15 bp, Homo sapiens
aatacattggtttta

SEQ ID NO: 165409 - DNA, 15 bp, Homo sapiens
atacattggttttat

SEQ ID NO: 165410 - DNA, 15 bp, Homo sapiens
tacattggttttata

SEQ ID NO: 165411 - DNA, 15 bp, Homo sapiens
acattggttttatat

SEQ ID NO: 165412 - DNA, 15 bp, Homo sapiens
cattggttttatatg

SEQ ID NO: 165413 - DNA, 15 bp, Homo sapiens
attggttttatatgc

SEQ ID NO: 165414 - DNA, 15 bp, Homo sapiens
ttggttttatatgct

SEQ ID NO: 165415 - DNA, 15 bp, Homo sapiens
tggttttatatgctt

SEQ ID NO: 165416 - DNA, 15 bp, Homo sapiens
ggttttatatgctta

SEQ ID NO: 165417 - DNA, 15 bp, Homo sapiens
gttttatatgcttac

SEQ ID NO: 165418 - DNA, 15 bp, Homo sapiens
ttttatatgcttaca

SEQ ID NO: 165419 - DNA, 15 bp, Homo sapiens
tttatatgcttacat

SEQ ID NO: 165420 - DNA, 15 bp, Homo sapiens
ttatatgcttacatt

SEQ ID NO: 165421 - DNA, 15 bp, Homo sapiens
tatatgcttacattt

SEQ ID NO: 165422 - DNA, 15 bp, Homo sapiens
atatgcttacattta

SEQ ID NO: 165423 - DNA, 15 bp, Homo sapiens
tatgcttacatttat

SEQ ID NO: 165424 - DNA, 15 bp, Homo sapiens
atgcttacatttatg

SEQ ID NO: 165425 - DNA, 15 bp, Homo sapiens
tgcttacatttatgt

SEQ ID NO: 165426 - DNA, 15 bp, Homo sapiens
gcttacatttatgtg

SEQ ID NO: 165427 - DNA, 15 bp, Homo sapiens
cttacatttatgtgt

SEQ ID NO: 165428 - DNA, 15 bp, Homo sapiens
ttacatttatgtgtt

SEQ ID NO: 165429 - DNA, 15 bp, Homo sapiens
tacatttatgtgtta

SEQ ID NO: 165430 - DNA, 15 bp, Homo sapiens
acatttatgtgttag

SEQ ID NO: 165431 - DNA, 15 bp, Homo sapiens
catttatgtgttagt

SEQ ID NO: 165432 - DNA, 15 bp, Homo sapiens
atttatgtgttagtt

SEQ ID NO: 165433 - DNA, 15 bp, Homo sapiens
tttatgtgttagtta

SEQ ID NO: 165434 - DNA, 15 bp, Homo sapiens
ttatgtgttagttat

SEQ ID NO: 165435 - DNA, 15 bp, Homo sapiens
tatgtgttagttatt

SEQ ID NO: 165436 - DNA, 15 bp, Homo sapiens
atgtgttagttatta

SEQ ID NO: 165437 - DNA, 15 bp, Homo sapiens
tgtgttagttattaa

SEQ ID NO: 165438 - DNA, 15 bp, Homo sapiens
gtgttagttattaaa

SEQ ID NO: 165439 - DNA, 15 bp, Homo sapiens
tgttagttattaaaa

SEQ ID NO: 165440 - DNA, 15 bp, Homo sapiens
gttagttattaaaac

SEQ ID NO: 165441 - DNA, 15 bp, Homo sapiens
ttagttattaaaaca

SEQ ID NO: 165442 - DNA, 15 bp, Homo sapiens
tagttattaaaacat

SEQ ID NO: 165443 - DNA, 15 bp, Homo sapiens
agttattaaaacata

SEQ ID NO: 165444 - DNA, 15 bp, Homo sapiens
gttattaaaacatac

SEQ ID NO: 165445 - DNA, 15 bp, Homo sapiens
ttattaaaacatact

SEQ ID NO: 165446 - DNA, 15 bp, Homo sapiens
tattaaaacatacta

SEQ ID NO: 165447 - DNA, 15 bp, Homo sapiens
attaaaacatactaa

SEQ ID NO: 165448 - DNA, 15 bp, Homo sapiens
ttaaaacatactaat

SEQ ID NO: 165449 - DNA, 15 bp, Homo sapiens
taaaacatactaata

SEQ ID NO: 165450 - DNA, 15 bp, Homo sapiens
aaaacatactaatat

SEQ ID NO: 165451 - DNA, 15 bp, Homo sapiens
aaacatactaatatt

SEQ ID NO: 165452 - DNA, 15 bp, Homo sapiens
aacatactaatattg

SEQ ID NO: 165453 - DNA, 15 bp, Homo sapiens
acatactaatattgt

SEQ ID NO: 165454 - DNA, 15 bp, Homo sapiens
catactaatattgta

SEQ ID NO: 165455 - DNA, 15 bp, Homo sapiens
atactaatattgtat

SEQ ID NO: 165456 - DNA, 15 bp, Homo sapiens
tactaatattgtata

SEQ ID NO: 165457 - DNA, 15 bp, Homo sapiens
actaatattgtatat

SEQ ID NO: 165458 - DNA, 15 bp, Homo sapiens
ctaatattgtatatc

SEQ ID NO: 165459 - DNA, 15 bp, Homo sapiens
taatattgtatatct

SEQ ID NO: 165460 - DNA, 15 bp, Homo sapiens
aatattgtatatcta

SEQ ID NO: 165461 - DNA, 15 bp, Homo sapiens
atattgtatatctag

SEQ ID NO: 165462 - DNA, 15 bp, Homo sapiens
tattgtatatctagt

SEQ ID NO: 165463 - DNA, 15 bp, Homo sapiens
attgtatatctagtc

SEQ ID NO: 165464 - DNA, 15 bp, Homo sapiens
ttgtatatctagtca

SEQ ID NO: 165465 - DNA, 15 bp, Homo sapiens
tgtatatctagtcaa

SEQ ID NO: 165466 - DNA, 15 bp, Homo sapiens
gtatatctagtcaaa

SEQ ID NO: 165467 - DNA, 15 bp, Homo sapiens
tatatctagtcaaaa

SEQ ID NO: 165468 - DNA, 15 bp, Homo sapiens
atatctagtcaaaac

SEQ ID NO: 165469 - DNA, 15 bp, Homo sapiens
tatctagtcaaaact

SEQ ID NO: 165470 - DNA, 15 bp, Homo sapiens
atctagtcaaaactg

SEQ ID NO: 165471 - DNA, 15 bp, Homo sapiens
tctagtcaaaactga

SEQ ID NO: 165472 - DNA, 15 bp, Homo sapiens
ctagtcaaaactgag

SEQ ID NO: 165473 - DNA, 15 bp, Homo sapiens
tagtcaaaactgagg

SEQ ID NO: 165474 - DNA, 15 bp, Homo sapiens
agtcaaaactgaggt

SEQ ID NO: 165475 - DNA, 15 bp, Homo sapiens
gtcaaaactgaggta

SEQ ID NO: 165476 - DNA, 15 bp, Homo sapiens
tcaaaactgaggtag

SEQ ID NO: 165477 - DNA, 15 bp, Homo sapiens
caaaactgaggtaga

SEQ ID NO: 165478 - DNA, 15 bp, Homo sapiens
aaaactgaggtagag

SEQ ID NO: 165479 - DNA, 15 bp, Homo sapiens
aaactgaggtagaga

SEQ ID NO: 165480 - DNA, 15 bp, Homo sapiens
aactgaggtagagag

SEQ ID NO: 165481 - DNA, 15 bp, Homo sapiens
actgaggtagagaga

SEQ ID NO: 165482 - DNA, 15 bp, Homo sapiens
ctgaggtagagagaa

SEQ ID NO: 165483 - DNA, 15 bp, Homo sapiens
tgaggtagagagaat

SEQ ID NO: 165484 - DNA, 15 bp, Homo sapiens
gaggtagagagaata

SEQ ID NO: 165485 - DNA, 15 bp, Homo sapiens
aggtagagagaataa

SEQ ID NO: 165486 - DNA, 15 bp, Homo sapiens
ggtagagagaataaa

SEQ ID NO: 165487 - DNA, 15 bp, Homo sapiens
gtagagagaataaat

SEQ ID NO: 165488 - DNA, 15 bp, Homo sapiens
tagagagaataaatg

SEQ ID NO: 165489 - DNA, 15 bp, Homo sapiens
agagagaataaatgg

SEQ ID NO: 165490 - DNA, 15 bp, Homo sapiens
gagagaataaatggt

SEQ ID NO: 165491 - DNA, 15 bp, Homo sapiens
agagaataaatggtt

SEQ ID NO: 165492 - DNA, 15 bp, Homo sapiens
gagaataaatggttg

SEQ ID NO: 165493 - DNA, 15 bp, Homo sapiens
agaataaatggttga

SEQ ID NO: 165494 - DNA, 15 bp, Homo sapiens
gaataaatggttgat

SEQ ID NO: 165495 - DNA, 15 bp, Homo sapiens
aataaatggttgatt

SEQ ID NO: 165496 - DNA, 15 bp, Homo sapiens
ataaatggttgattt

SEQ ID NO: 165497 - DNA, 15 bp, Homo sapiens
taaatggttgatttt

SEQ ID NO: 165498 - DNA, 15 bp, Homo sapiens
aaatggttgattttg

SEQ ID NO: 165499 - DNA, 15 bp, Homo sapiens
aatggttgattttga

SEQ ID NO: 165500 - DNA, 15 bp, Homo sapiens
atggttgattttgag

SEQ ID NO: 165501 - DNA, 15 bp, Homo sapiens
tggttgattttgagt

SEQ ID NO: 165502 - DNA, 15 bp, Homo sapiens
ggttgattttgagtt

SEQ ID NO: 165503 - DNA, 15 bp, Homo sapiens
gttgattttgagttt

SEQ ID NO: 165504 - DNA, 15 bp, Homo sapiens
ttgattttgagtttg

SEQ ID NO: 165505 - DNA, 15 bp, Homo sapiens
tgattttgagtttga

SEQ ID NO: 165506 - DNA, 15 bp, Homo sapiens
gattttgagtttgag

SEQ ID NO: 165507 - DNA, 15 bp, Homo sapiens
attttgagtttgagt

SEQ ID NO: 165508 - DNA, 15 bp, Homo sapiens
ttttgagtttgagtt

SEQ ID NO: 165509 - DNA, 15 bp, Homo sapiens
tttgagtttgagttt

SEQ ID NO: 165510 - DNA, 15 bp, Homo sapiens
ttgagtttgagtttc

SEQ ID NO: 165511 - DNA, 15 bp, Homo sapiens
tgagtttgagtttca

SEQ ID NO: 165512 - DNA, 15 bp, Homo sapiens
gagtttgagtttcat

SEQ ID NO: 165513 - DNA, 15 bp, Homo sapiens
agtttgagtttcata

SEQ ID NO: 165514 - DNA, 15 bp, Homo sapiens
gtttgagtttcatag

SEQ ID NO: 165515 - DNA, 15 bp, Homo sapiens
tttgagtttcatagt

SEQ ID NO: 165516 - DNA, 15 bp, Homo sapiens
ttgagtttcatagtc

SEQ ID NO: 165517 - DNA, 15 bp, Homo sapiens
tgagtttcatagtcc

SEQ ID NO: 165518 - DNA, 15 bp, Homo sapiens
gagtttcatagtcca

SEQ ID NO: 165519 - DNA, 15 bp, Homo sapiens
agtttcatagtccaa

SEQ ID NO: 165520 - DNA, 15 bp, Homo sapiens
gtttcatagtccaaa

SEQ ID NO: 165521 - DNA, 15 bp, Homo sapiens
tttcatagtccaaaa

SEQ ID NO: 165522 - DNA, 15 bp, Homo sapiens
ttcatagtccaaaaa

SEQ ID NO: 165523 - DNA, 15 bp, Homo sapiens
tcatagtccaaaaag

SEQ ID NO: 165524 - DNA, 15 bp, Homo sapiens
catagtccaaaaagc

SEQ ID NO: 165525 - DNA, 15 bp, Homo sapiens
atagtccaaaaagct

SEQ ID NO: 165526 - DNA, 15 bp, Homo sapiens
tagtccaaaaagctg

SEQ ID NO: 165527 - DNA, 15 bp, Homo sapiens
agtccaaaaagctga

SEQ ID NO: 165528 - DNA, 15 bp, Homo sapiens
gtccaaaaagctgat

SEQ ID NO: 165529 - DNA, 15 bp, Homo sapiens
tccaaaaagctgata

SEQ ID NO: 165530 - DNA, 15 bp, Homo sapiens
ccaaaaagctgatat

SEQ ID NO: 165531 - DNA, 15 bp, Homo sapiens
caaaaagctgatata

SEQ ID NO: 165532 - DNA, 15 bp, Homo sapiens
aaaaagctgatatat

SEQ ID NO: 165533 - DNA, 15 bp, Homo sapiens
aaaagctgatatatt

SEQ ID NO: 165534 - DNA, 15 bp, Homo sapiens
aaagctgatatattg

SEQ ID NO: 165535 - DNA, 15 bp, Homo sapiens
aagctgatatattgc

SEQ ID NO: 165536 - DNA, 15 bp, Homo sapiens
agctgatatattgcc

SEQ ID NO: 165537 - DNA, 15 bp, Homo sapiens
gctgatatattgcct

SEQ ID NO: 165538 - DNA, 15 bp, Homo sapiens
ctgatatattgcctg

SEQ ID NO: 165539 - DNA, 15 bp, Homo sapiens
tgatatattgcctgt

SEQ ID NO: 165540 - DNA, 15 bp, Homo sapiens
gatatattgcctgtg

SEQ ID NO: 165541 - DNA, 15 bp, Homo sapiens
atatattgcctgtgt

SEQ ID NO: 165542 - DNA, 15 bp, Homo sapiens
tatattgcctgtgtt

SEQ ID NO: 165543 - DNA, 15 bp, Homo sapiens
atattgcctgtgttc

SEQ ID NO: 165544 - DNA, 15 bp, Homo sapiens
tattgcctgtgttca

SEQ ID NO: 165545 - DNA, 15 bp, Homo sapiens
attgcctgtgttcaa

SEQ ID NO: 165546 - DNA, 15 bp, Homo sapiens
ttgcctgtgttcaag

SEQ ID NO: 165547 - DNA, 15 bp, Homo sapiens
tgcctgtgttcaaga

SEQ ID NO: 165548 - DNA, 15 bp, Homo sapiens
gcctgtgttcaagag

SEQ ID NO: 165549 - DNA, 15 bp, Homo sapiens
cctgtgttcaagagg

SEQ ID NO: 165550 - DNA, 15 bp, Homo sapiens
ctgtgttcaagaggg

SEQ ID NO: 165551 - DNA, 15 bp, Homo sapiens
tgtgttcaagagggt

SEQ ID NO: 165552 - DNA, 15 bp, Homo sapiens
gtgttcaagagggtc

SEQ ID NO: 165553 - DNA, 15 bp, Homo sapiens
tgttcaagagggtct

SEQ ID NO: 165554 - DNA, 15 bp, Homo sapiens
gttcaagagggtcta

SEQ ID NO: 165555 - DNA, 15 bp, Homo sapiens
ttcaagagggtctat

SEQ ID NO: 165556 - DNA, 15 bp, Homo sapiens
tcaagagggtctata

SEQ ID NO: 165557 - DNA, 15 bp, Homo sapiens
caagagggtctatat

SEQ ID NO: 165558 - DNA, 15 bp, Homo sapiens
aagagggtctatatc

SEQ ID NO: 165559 - DNA, 15 bp, Homo sapiens
agagggtctatatca

SEQ ID NO: 165560 - DNA, 15 bp, Homo sapiens
gagggtctatatcag

SEQ ID NO: 165561 - DNA, 15 bp, Homo sapiens
agggtctatatcagc

SEQ ID NO: 165562 - DNA, 15 bp, Homo sapiens
gggtctatatcagcc

SEQ ID NO: 165563 - DNA, 15 bp, Homo sapiens
ggtctatatcagccc

SEQ ID NO: 165564 - DNA, 15 bp, Homo sapiens
gtctatatcagccct

SEQ ID NO: 165565 - DNA, 15 bp, Homo sapiens
tctatatcagccctc

SEQ ID NO: 165566 - DNA, 15 bp, Homo sapiens
ctatatcagccctct

SEQ ID NO: 165567 - DNA, 15 bp, Homo sapiens
tatatcagccctcta

SEQ ID NO: 165568 - DNA, 15 bp, Homo sapiens
atatcagccctctag

SEQ ID NO: 165569 - DNA, 15 bp, Homo sapiens
tatcagccctctaga

SEQ ID NO: 165570 - DNA, 15 bp, Homo sapiens
atcagccctctagat

SEQ ID NO: 165571 - DNA, 15 bp, Homo sapiens
tcagccctctagatg

SEQ ID NO: 165572 - DNA, 15 bp, Homo sapiens
cagccctctagatgc

SEQ ID NO: 165573 - DNA, 15 bp, Homo sapiens
agccctctagatgcc

SEQ ID NO: 165574 - DNA, 15 bp, Homo sapiens
gccctctagatgcca

SEQ ID NO: 165575 - DNA, 15 bp, Homo sapiens
ccctctagatgccag

SEQ ID NO: 165576 - DNA, 15 bp, Homo sapiens
cctctagatgccagc

SEQ ID NO: 165577 - DNA, 15 bp, Homo sapiens
ctctagatgccagca

SEQ ID NO: 165578 - DNA, 15 bp, Homo sapiens
tctagatgccagcat

SEQ ID NO: 165579 - DNA, 15 bp, Homo sapiens
ctagatgccagcatc

SEQ ID NO: 165580 - DNA, 15 bp, Homo sapiens
tagatgccagcatct

SEQ ID NO: 165581 - DNA, 15 bp, Homo sapiens
agatgccagcatctc

SEQ ID NO: 165582 - DNA, 15 bp, Homo sapiens
gatgccagcatctcc

SEQ ID NO: 165583 - DNA, 15 bp, Homo sapiens
atgccagcatctcca

SEQ ID NO: 165584 - DNA, 15 bp, Homo sapiens
tgccagcatctccaa

SEQ ID NO: 165585 - DNA, 15 bp, Homo sapiens
gccagcatctccaaa

SEQ ID NO: 165586 - DNA, 15 bp, Homo sapiens
ccagcatctccaaat

SEQ ID NO: 165587 - DNA, 15 bp, Homo sapiens
cagcatctccaaatt

SEQ ID NO: 165588 - DNA, 15 bp, Homo sapiens
agcatctccaaattt

SEQ ID NO: 165589 - DNA, 15 bp, Homo sapiens
gcatctccaaatttt

SEQ ID NO: 165590 - DNA, 15 bp, Homo sapiens
catctccaaatttta

SEQ ID NO: 165591 - DNA, 15 bp, Homo sapiens
atctccaaattttac

SEQ ID NO: 165592 - DNA, 15 bp, Homo sapiens
tctccaaattttact

SEQ ID NO: 165593 - DNA, 15 bp, Homo sapiens
ctccaaattttactt

SEQ ID NO: 165594 - DNA, 15 bp, Homo sapiens
tccaaattttacttt

SEQ ID NO: 165595 - DNA, 15 bp, Homo sapiens
ccaaattttactttt

SEQ ID NO: 165596 - DNA, 15 bp, Homo sapiens
caaattttacttttt

SEQ ID NO: 165597 - DNA, 15 bp, Homo sapiens
aaattttactttttt

SEQ ID NO: 165598 - DNA, 15 bp, Homo sapiens
aattttacttttttg

SEQ ID NO: 165599 - DNA, 15 bp, Homo sapiens
attttacttttttgg

SEQ ID NO: 165600 - DNA, 15 bp, Homo sapiens
ttttacttttttgga

SEQ ID NO: 165601 - DNA, 15 bp, Homo sapiens
tttacttttttggaa

SEQ ID NO: 165602 - DNA, 15 bp, Homo sapiens
ttacttttttggaat

SEQ ID NO: 165603 - DNA, 15 bp, Homo sapiens
tacttttttggaatc

SEQ ID NO: 165604 - DNA, 15 bp, Homo sapiens
acttttttggaatct

SEQ ID NO: 165605 - DNA, 15 bp, Homo sapiens
cttttttggaatctg

SEQ ID NO: 165606 - DNA, 15 bp, Homo sapiens
ttttttggaatctgt

SEQ ID NO: 165607 - DNA, 15 bp, Homo sapiens
tttttggaatctgta

SEQ ID NO: 165608 - DNA, 15 bp, Homo sapiens
ttttggaatctgtac

SEQ ID NO: 165609 - DNA, 15 bp, Homo sapiens
tttggaatctgtaca

SEQ ID NO: 165610 - DNA, 15 bp, Homo sapiens
ttggaatctgtacag

SEQ ID NO: 165611 - DNA, 15 bp, Homo sapiens
tggaatctgtacagt

SEQ ID NO: 165612 - DNA, 15 bp, Homo sapiens
ggaatctgtacagta

SEQ ID NO: 165613 - DNA, 15 bp, Homo sapiens
gaatctgtacagtat

SEQ ID NO: 165614 - DNA, 15 bp, Homo sapiens
aatctgtacagtatt

SEQ ID NO: 165615 - DNA, 15 bp, Homo sapiens
atctgtacagtattt

SEQ ID NO: 165616 - DNA, 15 bp, Homo sapiens
tctgtacagtatttg

SEQ ID NO: 165617 - DNA, 15 bp, Homo sapiens
ctgtacagtatttgc

SEQ ID NO: 165618 - DNA, 15 bp, Homo sapiens
tgtacagtatttgca

SEQ ID NO: 165619 - DNA, 15 bp, Homo sapiens
gtacagtatttgcaa

SEQ ID NO: 165620 - DNA, 15 bp, Homo sapiens
tacagtatttgcaat

SEQ ID NO: 165621 - DNA, 15 bp, Homo sapiens
acagtatttgcaata

SEQ ID NO: 165622 - DNA, 15 bp, Homo sapiens
cagtatttgcaatat

SEQ ID NO: 165623 - DNA, 15 bp, Homo sapiens
agtatttgcaatatt

SEQ ID NO: 165624 - DNA, 15 bp, Homo sapiens
gtatttgcaatattt

SEQ ID NO: 165625 - DNA, 15 bp, Homo sapiens
tatttgcaatatttt

SEQ ID NO: 165626 - DNA, 15 bp, Homo sapiens
atttgcaatattttt

SEQ ID NO: 165627 - DNA, 15 bp, Homo sapiens
tttgcaatattttta

SEQ ID NO: 165628 - DNA, 15 bp, Homo sapiens
ttgcaatatttttat

SEQ ID NO: 165629 - DNA, 15 bp, Homo sapiens
tgcaatatttttatt

SEQ ID NO: 165630 - DNA, 15 bp, Homo sapiens
gcaatatttttatta

SEQ ID NO: 165631 - DNA, 15 bp, Homo sapiens
caatatttttattac

SEQ ID NO: 165632 - DNA, 15 bp, Homo sapiens
aatatttttattaca

SEQ ID NO: 165633 - DNA, 15 bp, Homo sapiens
atatttttattacaa

SEQ ID NO: 165634 - DNA, 15 bp, Homo sapiens
tatttttattacaaa

SEQ ID NO: 165635 - DNA, 15 bp, Homo sapiens
atttttattacaaat

SEQ ID NO: 165636 - DNA, 15 bp, Homo sapiens
tttttattacaaatt

SEQ ID NO: 165637 - DNA, 15 bp, Homo sapiens
ttttattacaaattt

SEQ ID NO: 165638 - DNA, 15 bp, Homo sapiens
tttattacaaatttc

SEQ ID NO: 165639 - DNA, 15 bp, Homo sapiens
ttattacaaatttct

SEQ ID NO: 165640 - DNA, 15 bp, Homo sapiens
tattacaaatttcta

SEQ ID NO: 165641 - DNA, 15 bp, Homo sapiens
attacaaatttctac

SEQ ID NO: 165642 - DNA, 15 bp, Homo sapiens
ttacaaatttctact

SEQ ID NO: 165643 - DNA, 15 bp, Homo sapiens
tacaaatttctactc

SEQ ID NO: 165644 - DNA, 15 bp, Homo sapiens
acaaatttctactct

SEQ ID NO: 165645 - DNA, 15 bp, Homo sapiens
caaatttctactctg

SEQ ID NO: 165646 - DNA, 15 bp, Homo sapiens
aaatttctactctgt

SEQ ID NO: 165647 - DNA, 15 bp, Homo sapiens
aatttctactctgtg

SEQ ID NO: 165648 - DNA, 15 bp, Homo sapiens
atttctactctgtgg

SEQ ID NO: 165649 - DNA, 15 bp, Homo sapiens
tttctactctgtgga

SEQ ID NO: 165650 - DNA, 15 bp, Homo sapiens
ttctactctgtggaa

SEQ ID NO: 165651 - DNA, 15 bp, Homo sapiens
tctactctgtggaat

SEQ ID NO: 165652 - DNA, 15 bp, Homo sapiens
ctactctgtggaatt

SEQ ID NO: 165653 - DNA, 15 bp, Homo sapiens
tactctgtggaattt

SEQ ID NO: 165654 - DNA, 15 bp, Homo sapiens
actctgtggaattta

SEQ ID NO: 165655 - DNA, 15 bp, Homo sapiens
ctctgtggaatttaa

SEQ ID NO: 165656 - DNA, 15 bp, Homo sapiens
tctgtggaatttaat

SEQ ID NO: 165657 - DNA, 15 bp, Homo sapiens
ctgtggaatttaatt

SEQ ID NO: 165658 - DNA, 15 bp, Homo sapiens
tgtggaatttaattt

SEQ ID NO: 165659 - DNA, 15 bp, Homo sapiens
gtggaatttaatttt

SEQ ID NO: 165660 - DNA, 15 bp, Homo sapiens
tggaatttaattttt

SEQ ID NO: 165661 - DNA, 15 bp, Homo sapiens
ggaatttaattttta

SEQ ID NO: 165662 - DNA, 15 bp, Homo sapiens
gaatttaatttttaa

SEQ ID NO: 165663 - DNA, 15 bp, Homo sapiens
aatttaatttttaaa

SEQ ID NO: 165664 - DNA, 15 bp, Homo sapiens
atttaatttttaaaa

SEQ ID NO: 165665 - DNA, 15 bp, Homo sapiens
tttaatttttaaaat

SEQ ID NO: 165666 - DNA, 15 bp, Homo sapiens
ttaatttttaaaata

SEQ ID NO: 165667 - DNA, 15 bp, Homo sapiens
taatttttaaaatac

SEQ ID NO: 165668 - DNA, 15 bp, Homo sapiens
aatttttaaaatacc

SEQ ID NO: 165669 - DNA, 15 bp, Homo sapiens
atttttaaaatacct

SEQ ID NO: 165670 - DNA, 15 bp, Homo sapiens
tttttaaaatacctg

SEQ ID NO: 165671 - DNA, 15 bp, Homo sapiens
ttttaaaatacctgc

SEQ ID NO: 165672 - DNA, 15 bp, Homo sapiens
tttaaaatacctgca

SEQ ID NO: 165673 - DNA, 15 bp, Homo sapiens
ttaaaatacctgcaa

SEQ ID NO: 165674 - DNA, 15 bp, Homo sapiens
taaaatacctgcaat

SEQ ID NO: 165675 - DNA, 15 bp, Homo sapiens
aaaatacctgcaata

SEQ ID NO: 165676 - DNA, 15 bp, Homo sapiens
aaatacctgcaatac

SEQ ID NO: 165677 - DNA, 15 bp, Homo sapiens
aatacctgcaataca

SEQ ID NO: 165678 - DNA, 15 bp, Homo sapiens
atacctgcaatacat

SEQ ID NO: 165679 - DNA, 15 bp, Homo sapiens
tacctgcaatacata

SEQ ID NO: 165680 - DNA, 15 bp, Homo sapiens
acctgcaatacatat

SEQ ID NO: 165681 - DNA, 15 bp, Homo sapiens
cctgcaatacatata

SEQ ID NO: 165682 - DNA, 15 bp, Homo sapiens
ctgcaatacatatat

SEQ ID NO: 165683 - DNA, 15 bp, Homo sapiens
tgcaatacatatata

SEQ ID NO: 165684 - DNA, 15 bp, Homo sapiens
gcaatacatatatat

SEQ ID NO: 165685 - DNA, 15 bp, Homo sapiens
caatacatatatatg

SEQ ID NO: 165686 - DNA, 15 bp, Homo sapiens
aatacatatatatgt

SEQ ID NO: 165687 - DNA, 15 bp, Homo sapiens
atacatatatatgtt

SEQ ID NO: 165688 - DNA, 15 bp, Homo sapiens
tacatatatatgttg

SEQ ID NO: 165689 - DNA, 15 bp, Homo sapiens
acatatatatgttga

SEQ ID NO: 165690 - DNA, 15 bp, Homo sapiens
catatatatgttgaa

SEQ ID NO: 165691 - DNA, 15 bp, Homo sapiens
atatatatgttgaat

SEQ ID NO: 165692 - DNA, 15 bp, Homo sapiens
tatatatgttgaata

SEQ ID NO: 165693 - DNA, 15 bp, Homo sapiens
atatatgttgaatag

SEQ ID NO: 165694 - DNA, 15 bp, Homo sapiens
tatatgttgaataga

SEQ ID NO: 165695 - DNA, 15 bp, Homo sapiens
atatgttgaatagat

SEQ ID NO: 165696 - DNA, 15 bp, Homo sapiens
tatgttgaatagatg

SEQ ID NO: 165697 - DNA, 15 bp, Homo sapiens
atgttgaatagatga

SEQ ID NO: 165698 - DNA, 15 bp, Homo sapiens
tgttgaatagatgaa

SEQ ID NO: 165699 - DNA, 15 bp, Homo sapiens
gttgaatagatgaaa

SEQ ID NO: 165700 - DNA, 15 bp, Homo sapiens
ttgaatagatgaaaa

SEQ ID NO: 165701 - DNA, 15 bp, Homo sapiens
tgaatagatgaaaaa

SEQ ID NO: 165702 - DNA, 15 bp, Homo sapiens
gaatagatgaaaaat

SEQ ID NO: 165703 - DNA, 15 bp, Homo sapiens
aatagatgaaaaatt

SEQ ID NO: 165704 - DNA, 15 bp, Homo sapiens
atagatgaaaaatta

SEQ ID NO: 165705 - DNA, 15 bp, Homo sapiens
tagatgaaaaattat

SEQ ID NO: 165706 - DNA, 15 bp, Homo sapiens
agatgaaaaattatg

SEQ ID NO: 165707 - DNA, 15 bp, Homo sapiens
gatgaaaaattatgt

SEQ ID NO: 165708 - DNA, 15 bp, Homo sapiens
atgaaaaattatgta

SEQ ID NO: 165709 - DNA, 15 bp, Homo sapiens
tgaaaaattatgtag

SEQ ID NO: 165710 - DNA, 15 bp, Homo sapiens
gaaaaattatgtaga

SEQ ID NO: 165711 - DNA, 15 bp, Homo sapiens
aaaaattatgtagat

SEQ ID NO: 165712 - DNA, 15 bp, Homo sapiens
aaaattatgtagata

SEQ ID NO: 165713 - DNA, 15 bp, Homo sapiens
aaattatgtagataa

SEQ ID NO: 165714 - DNA, 15 bp, Homo sapiens
aattatgtagataat

SEQ ID NO: 165715 - DNA, 15 bp, Homo sapiens
attatgtagataata

SEQ ID NO: 165716 - DNA, 15 bp, Homo sapiens
ttatgtagataataa

SEQ ID NO: 165717 - DNA, 15 bp, Homo sapiens
tatgtagataataat

SEQ ID NO: 165718 - DNA, 15 bp, Homo sapiens
atgtagataataatg

SEQ ID NO: 165719 - DNA, 15 bp, Homo sapiens
tgtagataataatga

SEQ ID NO: 165720 - DNA, 15 bp, Homo sapiens
gtagataataatgaa

SEQ ID NO: 165721 - DNA, 15 bp, Homo sapiens
tagataataatgaat

SEQ ID NO: 165722 - DNA, 15 bp, Homo sapiens
agataataatgaatg

SEQ ID NO: 165723 - DNA, 15 bp, Homo sapiens
gataataatgaatga

SEQ ID NO: 165724 - DNA, 15 bp, Homo sapiens
ataataatgaatgat

SEQ ID NO: 165725 - DNA, 15 bp, Homo sapiens
taataatgaatgata

SEQ ID NO: 165726 - DNA, 15 bp, Homo sapiens
aataatgaatgatac

SEQ ID NO: 165727 - DNA, 15 bp, Homo sapiens
ataatgaatgatacg

SEQ ID NO: 165728 - DNA, 15 bp, Homo sapiens
taatgaatgatacgg

SEQ ID NO: 165729 - DNA, 15 bp, Homo sapiens
aatgaatgatacggt

SEQ ID NO: 165730 - DNA, 15 bp, Homo sapiens
atgaatgatacggtt

SEQ ID NO: 165731 - DNA, 15 bp, Homo sapiens
tgaatgatacggttc

SEQ ID NO: 165732 - DNA, 15 bp, Homo sapiens
gaatgatacggttct

SEQ ID NO: 165733 - DNA, 15 bp, Homo sapiens
aatgatacggttcta

SEQ ID NO: 165734 - DNA, 15 bp, Homo sapiens
atgatacggttctaa

SEQ ID NO: 165735 - DNA, 15 bp, Homo sapiens
tgatacggttctaaa

SEQ ID NO: 165736 - DNA, 15 bp, Homo sapiens
gatacggttctaaaa

SEQ ID NO: 165737 - DNA, 15 bp, Homo sapiens
atacggttctaaaaa

SEQ ID NO: 165738 - DNA, 15 bp, Homo sapiens
tacggttctaaaaag

SEQ ID NO: 165739 - DNA, 15 bp, Homo sapiens
acggttctaaaaaga

SEQ ID NO: 165740 - DNA, 15 bp, Homo sapiens
cggttctaaaaagac

SEQ ID NO: 165741 - DNA, 15 bp, Homo sapiens
ggttctaaaaagaca

SEQ ID NO: 165742 - DNA, 15 bp, Homo sapiens
gttctaaaaagacag

SEQ ID NO: 165743 - DNA, 15 bp, Homo sapiens
ttctaaaaagacagg

SEQ ID NO: 165744 - DNA, 15 bp, Homo sapiens
tctaaaaagacaggt

SEQ ID NO: 165745 - DNA, 15 bp, Homo sapiens
ctaaaaagacaggtt

SEQ ID NO: 165746 - DNA, 15 bp, Homo sapiens
taaaaagacaggtta

SEQ ID NO: 165747 - DNA, 15 bp, Homo sapiens
aaaaagacaggttaa

SEQ ID NO: 165748 - DNA, 15 bp, Homo sapiens
aaaagacaggttaaa

SEQ ID NO: 165749 - DNA, 15 bp, Homo sapiens
aaagacaggttaaaa

SEQ ID NO: 165750 - DNA, 15 bp, Homo sapiens
aagacaggttaaaaa

SEQ ID NO: 165751 - DNA, 15 bp, Homo sapiens
agacaggttaaaaag

SEQ ID NO: 165752 - DNA, 15 bp, Homo sapiens
gacaggttaaaaagt

SEQ ID NO: 165753 - DNA, 15 bp, Homo sapiens
acaggttaaaaagta

SEQ ID NO: 165754 - DNA, 15 bp, Homo sapiens
caggttaaaaagtaa

SEQ ID NO: 165755 - DNA, 15 bp, Homo sapiens
aggttaaaaagtaag

SEQ ID NO: 165756 - DNA, 15 bp, Homo sapiens
ggttaaaaagtaagt

SEQ ID NO: 165757 - DNA, 15 bp, Homo sapiens
gttaaaaagtaagtt

SEQ ID NO: 165758 - DNA, 15 bp, Homo sapiens
ttaaaaagtaagttc

SEQ ID NO: 165759 - DNA, 15 bp, Homo sapiens
taaaaagtaagttca

SEQ ID NO: 165760 - DNA, 15 bp, Homo sapiens
aaaaagtaagttcac

SEQ ID NO: 165761 - DNA, 15 bp, Homo sapiens
aaaagtaagttcact

SEQ ID NO: 165762 - DNA, 15 bp, Homo sapiens
aaagtaagttcactt

SEQ ID NO: 165763 - DNA, 15 bp, Homo sapiens
aagtaagttcacttt

SEQ ID NO: 165764 - DNA, 15 bp, Homo sapiens
agtaagttcactttt

SEQ ID NO: 165765 - DNA, 15 bp, Homo sapiens
gtaagttcactttta

SEQ ID NO: 165766 - DNA, 15 bp, Homo sapiens
taagttcacttttat

SEQ ID NO: 165767 - DNA, 15 bp, Homo sapiens
aagttcacttttatt

SEQ ID NO: 165768 - DNA, 15 bp, Homo sapiens
agttcacttttattt

SEQ ID NO: 165769 - DNA, 15 bp, Homo sapiens
gttcacttttatttt

SEQ ID NO: 165770 - DNA, 15 bp, Homo sapiens
ttcacttttattttg

SEQ ID NO: 165771 - DNA, 15 bp, Homo sapiens
tcacttttattttga

SEQ ID NO: 165772 - DNA, 15 bp, Homo sapiens
cacttttattttgag

SEQ ID NO: 165773 - DNA, 15 bp, Homo sapiens
acttttattttgagc

SEQ ID NO: 165774 - DNA, 15 bp, Homo sapiens
cttttattttgagct

SEQ ID NO: 165775 - DNA, 15 bp, Homo sapiens
ttttattttgagctt

SEQ ID NO: 165776 - DNA, 15 bp, Homo sapiens
tttattttgagcttc

SEQ ID NO: 165777 - DNA, 15 bp, Homo sapiens
ttattttgagcttca

SEQ ID NO: 165778 - DNA, 15 bp, Homo sapiens
tattttgagcttcag

SEQ ID NO: 165779 - DNA, 15 bp, Homo sapiens
attttgagcttcaga

SEQ ID NO: 165780 - DNA, 15 bp, Homo sapiens
ttttgagcttcagaa

SEQ ID NO: 165781 - DNA, 15 bp, Homo sapiens
tttgagcttcagaat

SEQ ID NO: 165782 - DNA, 15 bp, Homo sapiens
ttgagcttcagaatc

SEQ ID NO: 165783 - DNA, 15 bp, Homo sapiens
tgagcttcagaatca

SEQ ID NO: 165784 - DNA, 15 bp, Homo sapiens
gagcttcagaatcat

SEQ ID NO: 165785 - DNA, 15 bp, Homo sapiens
agcttcagaatcatt

SEQ ID NO: 165786 - DNA, 15 bp, Homo sapiens
gcttcagaatcattc

SEQ ID NO: 165787 - DNA, 15 bp, Homo sapiens
cttcagaatcattca

SEQ ID NO: 165788 - DNA, 15 bp, Homo sapiens
ttcagaatcattcag

SEQ ID NO: 165789 - DNA, 15 bp, Homo sapiens
tcagaatcattcaga

SEQ ID NO: 165790 - DNA, 15 bp, Homo sapiens
cagaatcattcagaa

SEQ ID NO: 165791 - DNA, 15 bp, Homo sapiens
agaatcattcagaag

SEQ ID NO: 165792 - DNA, 15 bp, Homo sapiens
gaatcattcagaagc

SEQ ID NO: 165793 - DNA, 15 bp, Homo sapiens
aatcattcagaagcc

SEQ ID NO: 165794 - DNA, 15 bp, Homo sapiens
atcattcagaagcca

SEQ ID NO: 165795 - DNA, 15 bp, Homo sapiens
tcattcagaagccag

SEQ ID NO: 165796 - DNA, 15 bp, Homo sapiens
cattcagaagccagt

SEQ ID NO: 165797 - DNA, 15 bp, Homo sapiens
attcagaagccagtc

SEQ ID NO: 165798 - DNA, 15 bp, Homo sapiens
ttcagaagccagtcg

SEQ ID NO: 165799 - DNA, 15 bp, Homo sapiens
tcagaagccagtcgc

SEQ ID NO: 165800 - DNA, 15 bp, Homo sapiens
cagaagccagtcgcc

SEQ ID NO: 165801 - DNA, 15 bp, Homo sapiens
agaagccagtcgcca

SEQ ID NO: 165802 - DNA, 15 bp, Homo sapiens
gaagccagtcgccac

SEQ ID NO: 165803 - DNA, 15 bp, Homo sapiens
aagccagtcgccaca

SEQ ID NO: 165804 - DNA, 15 bp, Homo sapiens
agccagtcgccacaa

SEQ ID NO: 165805 - DNA, 15 bp, Homo sapiens
gccagtcgccacaaa

SEQ ID NO: 165806 - DNA, 15 bp, Homo sapiens
ccagtcgccacaaac

SEQ ID NO: 165807 - DNA, 15 bp, Homo sapiens
cagtcgccacaaacg

SEQ ID NO: 165808 - DNA, 15 bp, Homo sapiens
agtcgccacaaacgc

SEQ ID NO: 165809 - DNA, 15 bp, Homo sapiens
gtcgccacaaacgca

SEQ ID NO: 165810 - DNA, 15 bp, Homo sapiens
tcgccacaaacgcag

SEQ ID NO: 165811 - DNA, 15 bp, Homo sapiens
cgccacaaacgcaga

SEQ ID NO: 165812 - DNA, 15 bp, Homo sapiens
gccacaaacgcagac

SEQ ID NO: 165813 - DNA, 15 bp, Homo sapiens
ccacaaacgcagacc

SEQ ID NO: 165814 - DNA, 15 bp, Homo sapiens
cacaaacgcagacca

SEQ ID NO: 165815 - DNA, 15 bp, Homo sapiens
acaaacgcagaccaa

SEQ ID NO: 165816 - DNA, 15 bp, Homo sapiens
caaacgcagaccaag

SEQ ID NO: 165817 - DNA, 15 bp, Homo sapiens
aaacgcagaccaagg

SEQ ID NO: 165818 - DNA, 15 bp, Homo sapiens
aacgcagaccaaggc

SEQ ID NO: 165819 - DNA, 15 bp, Homo sapiens
acgcagaccaaggct

SEQ ID NO: 165820 - DNA, 15 bp, Homo sapiens
cgcagaccaaggctc

SEQ ID NO: 165821 - DNA, 15 bp, Homo sapiens
gcagaccaaggctct

SEQ ID NO: 165822 - DNA, 15 bp, Homo sapiens
cagaccaaggctctt

SEQ ID NO: 165823 - DNA, 15 bp, Homo sapiens
agaccaaggctcttg

SEQ ID NO: 165824 - DNA, 15 bp, Homo sapiens
gaccaaggctcttgg

SEQ ID NO: 165825 - DNA, 15 bp, Homo sapiens
accaaggctcttggc

SEQ ID NO: 165826 - DNA, 15 bp, Homo sapiens
ccaaggctcttggca

SEQ ID NO: 165827 - DNA, 15 bp, Homo sapiens
caaggctcttggcac

SEQ ID NO: 165828 - DNA, 15 bp, Homo sapiens
aaggctcttggcaca

SEQ ID NO: 165829 - DNA, 15 bp, Homo sapiens
aggctcttggcacat

SEQ ID NO: 165830 - DNA, 15 bp, Homo sapiens
ggctcttggcacatc

SEQ ID NO: 165831 - DNA, 15 bp, Homo sapiens
gctcttggcacatca

SEQ ID NO: 165832 - DNA, 15 bp, Homo sapiens
ctcttggcacatcaa

SEQ ID NO: 165833 - DNA, 15 bp, Homo sapiens
tcttggcacatcaaa

SEQ ID NO: 165834 - DNA, 15 bp, Homo sapiens
cttggcacatcaaat

SEQ ID NO: 165835 - DNA, 15 bp, Homo sapiens
ttggcacatcaaata

SEQ ID NO: 165836 - DNA, 15 bp, Homo sapiens
tggcacatcaaatat

SEQ ID NO: 165837 - DNA, 15 bp, Homo sapiens
ggcacatcaaatatg

SEQ ID NO: 165838 - DNA, 15 bp, Homo sapiens
gcacatcaaatatgc

SEQ ID NO: 165839 - DNA, 15 bp, Homo sapiens
cacatcaaatatgcc

SEQ ID NO: 165840 - DNA, 15 bp, Homo sapiens
acatcaaatatgcct

SEQ ID NO: 165841 - DNA, 15 bp, Homo sapiens
catcaaatatgccta

SEQ ID NO: 165842 - DNA, 15 bp, Homo sapiens
atcaaatatgcctat

SEQ ID NO: 165843 - DNA, 15 bp, Homo sapiens
tcaaatatgcctatg

SEQ ID NO: 165844 - DNA, 15 bp, Homo sapiens
caaatatgcctatgg

SEQ ID NO: 165845 - DNA, 15 bp, Homo sapiens
aaatatgcctatggc

SEQ ID NO: 165846 - DNA, 15 bp, Homo sapiens
aatatgcctatggct

SEQ ID NO: 165847 - DNA, 15 bp, Homo sapiens
atatgcctatggctt

SEQ ID NO: 165848 - DNA, 15 bp, Homo sapiens
tatgcctatggctta

SEQ ID NO: 165849 - DNA, 15 bp, Homo sapiens
atgcctatggcttag

SEQ ID NO: 165850 - DNA, 15 bp, Homo sapiens
tgcctatggcttagg

SEQ ID NO: 165851 - DNA, 15 bp, Homo sapiens
gcctatggcttaggg

SEQ ID NO: 165852 - DNA, 15 bp, Homo sapiens
cctatggcttagggt

SEQ ID NO: 165853 - DNA, 15 bp, Homo sapiens
ctatggcttagggtt

SEQ ID NO: 165854 - DNA, 15 bp, Homo sapiens
tatggcttagggtta

SEQ ID NO: 165855 - DNA, 15 bp, Homo sapiens
atggcttagggttat

SEQ ID NO: 165856 - DNA, 15 bp, Homo sapiens
tggcttagggttatt

SEQ ID NO: 165857 - DNA, 15 bp, Homo sapiens
ggcttagggttattg

SEQ ID NO: 165858 - DNA, 15 bp, Homo sapiens
gcttagggttattga

SEQ ID NO: 165859 - DNA, 15 bp, Homo sapiens
cttagggttattgac

SEQ ID NO: 165860 - DNA, 15 bp, Homo sapiens
ttagggttattgaca

SEQ ID NO: 165861 - DNA, 15 bp, Homo sapiens
tagggttattgacaa

SEQ ID NO: 165862 - DNA, 15 bp, Homo sapiens
agggttattgacaag

SEQ ID NO: 165863 - DNA, 15 bp, Homo sapiens
gggttattgacaagt

SEQ ID NO: 165864 - DNA, 15 bp, Homo sapiens
ggttattgacaagtc

SEQ ID NO: 165865 - DNA, 15 bp, Homo sapiens
gttattgacaagtct

SEQ ID NO: 165866 - DNA, 15 bp, Homo sapiens
ttattgacaagtctt

SEQ ID NO: 165867 - DNA, 15 bp, Homo sapiens
tattgacaagtctta

SEQ ID NO: 165868 - DNA, 15 bp, Homo sapiens
attgacaagtcttat

SEQ ID NO: 165869 - DNA, 15 bp, Homo sapiens
ttgacaagtcttatg

SEQ ID NO: 165870 - DNA, 15 bp, Homo sapiens
tgacaagtcttatgt

SEQ ID NO: 165871 - DNA, 15 bp, Homo sapiens
gacaagtcttatgtt

SEQ ID NO: 165872 - DNA, 15 bp, Homo sapiens
acaagtcttatgttg

SEQ ID NO: 165873 - DNA, 15 bp, Homo sapiens
caagtcttatgttgc

SEQ ID NO: 165874 - DNA, 15 bp, Homo sapiens
aagtcttatgttgca

SEQ ID NO: 165875 - DNA, 15 bp, Homo sapiens
agtcttatgttgcag

SEQ ID NO: 165876 - DNA, 15 bp, Homo sapiens
gtcttatgttgcagt

SEQ ID NO: 165877 - DNA, 15 bp, Homo sapiens
tcttatgttgcagtg

SEQ ID NO: 165878 - DNA, 15 bp, Homo sapiens
cttatgttgcagtgt

SEQ ID NO: 165879 - DNA, 15 bp, Homo sapiens
ttatgttgcagtgta

SEQ ID NO: 165880 - DNA, 15 bp, Homo sapiens
tatgttgcagtgtat

SEQ ID NO: 165881 - DNA, 15 bp, Homo sapiens
atgttgcagtgtatg

SEQ ID NO: 165882 - DNA, 15 bp, Homo sapiens
tgttgcagtgtatgt

SEQ ID NO: 165883 - DNA, 15 bp, Homo sapiens
gttgcagtgtatgtg

SEQ ID NO: 165884 - DNA, 15 bp, Homo sapiens
ttgcagtgtatgtgg

SEQ ID NO: 165885 - DNA, 15 bp, Homo sapiens
tgcagtgtatgtggt

SEQ ID NO: 165886 - DNA, 15 bp, Homo sapiens
gcagtgtatgtggtt

SEQ ID NO: 165887 - DNA, 15 bp, Homo sapiens
cagtgtatgtggttt

SEQ ID NO: 165888 - DNA, 15 bp, Homo sapiens
agtgtatgtggttta

SEQ ID NO: 165889 - DNA, 15 bp, Homo sapiens
gtgtatgtggtttat

SEQ ID NO: 165890 - DNA, 15 bp, Homo sapiens
tgtatgtggtttata

SEQ ID NO: 165891 - DNA, 15 bp, Homo sapiens
gtatgtggtttatag

SEQ ID NO: 165892 - DNA, 15 bp, Homo sapiens
tatgtggtttatagt

SEQ ID NO: 165893 - DNA, 15 bp, Homo sapiens
atgtggtttatagtc

SEQ ID NO: 165894 - DNA, 15 bp, Homo sapiens
tgtggtttatagtcc

SEQ ID NO: 165895 - DNA, 15 bp, Homo sapiens
gtggtttatagtcct

SEQ ID NO: 165896 - DNA, 15 bp, Homo sapiens
tggtttatagtcctg

SEQ ID NO: 165897 - DNA, 15 bp, Homo sapiens
ggtttatagtcctgc

SEQ ID NO: 165898 - DNA, 15 bp, Homo sapiens
gtttatagtcctgcc

SEQ ID NO: 165899 - DNA, 15 bp, Homo sapiens
tttatagtcctgcct

SEQ ID NO: 165900 - DNA, 15 bp, Homo sapiens
ttatagtcctgcctt

SEQ ID NO: 165901 - DNA, 15 bp, Homo sapiens
tatagtcctgccttc

SEQ ID NO: 165902 - DNA, 15 bp, Homo sapiens
atagtcctgccttcc

SEQ ID NO: 165903 - DNA, 15 bp, Homo sapiens
tagtcctgccttcca

SEQ ID NO: 165904 - DNA, 15 bp, Homo sapiens
agtcctgccttccac

SEQ ID NO: 165905 - DNA, 15 bp, Homo sapiens
gtcctgccttccaca

SEQ ID NO: 165906 - DNA, 15 bp, Homo sapiens
tcctgccttccacag

SEQ ID NO: 165907 - DNA, 15 bp, Homo sapiens
cctgccttccacagt

SEQ ID NO: 165908 - DNA, 15 bp, Homo sapiens
ctgccttccacagtt

SEQ ID NO: 165909 - DNA, 15 bp, Homo sapiens
tgccttccacagttg

SEQ ID NO: 165910 - DNA, 15 bp, Homo sapiens
gccttccacagttgc

SEQ ID NO: 165911 - DNA, 15 bp, Homo sapiens
ccttccacagttgct

SEQ ID NO: 165912 - DNA, 15 bp, Homo sapiens
cttccacagttgctt

SEQ ID NO: 165913 - DNA, 15 bp, Homo sapiens
ttccacagttgcttg

SEQ ID NO: 165914 - DNA, 15 bp, Homo sapiens
tccacagttgcttgg

SEQ ID NO: 165915 - DNA, 15 bp, Homo sapiens
ccacagttgcttggg

SEQ ID NO: 165916 - DNA, 15 bp, Homo sapiens
cacagttgcttggga

SEQ ID NO: 165917 - DNA, 15 bp, Homo sapiens
acagttgcttgggag

SEQ ID NO: 165918 - DNA, 15 bp, Homo sapiens
cagttgcttgggaga

SEQ ID NO: 165919 - DNA, 15 bp, Homo sapiens
agttgcttgggagag

SEQ ID NO: 165920 - DNA, 15 bp, Homo sapiens
gttgcttgggagagc

SEQ ID NO: 165921 - DNA, 15 bp, Homo sapiens
ttgcttgggagagct

SEQ ID NO: 165922 - DNA, 15 bp, Homo sapiens
tgcttgggagagctg

SEQ ID NO: 165923 - DNA, 15 bp, Homo sapiens
gcttgggagagctgt

SEQ ID NO: 165924 - DNA, 15 bp, Homo sapiens
cttgggagagctgtg

SEQ ID NO: 165925 - DNA, 15 bp, Homo sapiens
ttgggagagctgtga

SEQ ID NO: 165926 - DNA, 15 bp, Homo sapiens
tgggagagctgtgag

SEQ ID NO: 165927 - DNA, 15 bp, Homo sapiens
gggagagctgtgagt

SEQ ID NO: 165928 - DNA, 15 bp, Homo sapiens
ggagagctgtgagtc

SEQ ID NO: 165929 - DNA, 15 bp, Homo sapiens
gagagctgtgagtca

SEQ ID NO: 165930 - DNA, 15 bp, Homo sapiens
agagctgtgagtcac

SEQ ID NO: 165931 - DNA, 15 bp, Homo sapiens
gagctgtgagtcact

SEQ ID NO: 165932 - DNA, 15 bp, Homo sapiens
agctgtgagtcactg

SEQ ID NO: 165933 - DNA, 15 bp, Homo sapiens
gctgtgagtcactga

SEQ ID NO: 165934 - DNA, 15 bp, Homo sapiens
ctgtgagtcactgag

SEQ ID NO: 165935 - DNA, 15 bp, Homo sapiens
tgtgagtcactgagg

SEQ ID NO: 165936 - DNA, 15 bp, Homo sapiens
gtgagtcactgaggc

SEQ ID NO: 165937 - DNA, 15 bp, Homo sapiens
tgagtcactgaggct

SEQ ID NO: 165938 - DNA, 15 bp, Homo sapiens
gagtcactgaggctt

SEQ ID NO: 165939 - DNA, 15 bp, Homo sapiens
agtcactgaggctta

SEQ ID NO: 165940 - DNA, 15 bp, Homo sapiens
gtcactgaggcttat

SEQ ID NO: 165941 - DNA, 15 bp, Homo sapiens
tcactgaggcttatg

SEQ ID NO: 165942 - DNA, 15 bp, Homo sapiens
cactgaggcttatga

SEQ ID NO: 165943 - DNA, 15 bp, Homo sapiens
actgaggcttatgaa

SEQ ID NO: 165944 - DNA, 15 bp, Homo sapiens
ctgaggcttatgaat

SEQ ID NO: 165945 - DNA, 15 bp, Homo sapiens
tgaggcttatgaatg

SEQ ID NO: 165946 - DNA, 15 bp, Homo sapiens
gaggcttatgaatgt

SEQ ID NO: 165947 - DNA, 15 bp, Homo sapiens
aggcttatgaatgtt

SEQ ID NO: 165948 - DNA, 15 bp, Homo sapiens
ggcttatgaatgttt

SEQ ID NO: 165949 - DNA, 15 bp, Homo sapiens
gcttatgaatgttta

SEQ ID NO: 165950 - DNA, 15 bp, Homo sapiens
cttatgaatgtttac

SEQ ID NO: 165951 - DNA, 15 bp, Homo sapiens
ttatgaatgtttaca

SEQ ID NO: 165952 - DNA, 15 bp, Homo sapiens
tatgaatgtttacat

SEQ ID NO: 165953 - DNA, 15 bp, Homo sapiens
atgaatgtttacatt

SEQ ID NO: 165954 - DNA, 15 bp, Homo sapiens
tgaatgtttacattt

SEQ ID NO: 165955 - DNA, 15 bp, Homo sapiens
gaatgtttacatttt

SEQ ID NO: 165956 - DNA, 15 bp, Homo sapiens
aatgtttacattttg

SEQ ID NO: 165957 - DNA, 15 bp, Homo sapiens
atgtttacattttgt

SEQ ID NO: 165958 - DNA, 15 bp, Homo sapiens
tgtttacattttgtt

SEQ ID NO: 165959 - DNA, 15 bp, Homo sapiens
gtttacattttgttt

SEQ ID NO: 165960 - DNA, 15 bp, Homo sapiens
tttacattttgtttg

SEQ ID NO: 165961 - DNA, 15 bp, Homo sapiens
ttacattttgtttgt

SEQ ID NO: 165962 - DNA, 15 bp, Homo sapiens
tacattttgtttgtt

SEQ ID NO: 165963 - DNA, 15 bp, Homo sapiens
acattttgtttgttg

SEQ ID NO: 165964 - DNA, 15 bp, Homo sapiens
cattttgtttgttgc

SEQ ID NO: 165965 - DNA, 15 bp, Homo sapiens
attttgtttgttgca

SEQ ID NO: 165966 - DNA, 15 bp, Homo sapiens
ttttgtttgttgcag

SEQ ID NO: 165967 - DNA, 15 bp, Homo sapiens
tttgtttgttgcaga

SEQ ID NO: 165968 - DNA, 15 bp, Homo sapiens
ttgtttgttgcagat

SEQ ID NO: 165969 - DNA, 15 bp, Homo sapiens
tgtttgttgcagata

SEQ ID NO: 165970 - DNA, 15 bp, Homo sapiens
gtttgttgcagatat

SEQ ID NO: 165971 - DNA, 15 bp, Homo sapiens
tttgttgcagatata

SEQ ID NO: 165972 - DNA, 15 bp, Homo sapiens
ttgttgcagatatat

SEQ ID NO: 165973 - DNA, 15 bp, Homo sapiens
tgttgcagatatata

SEQ ID NO: 165974 - DNA, 15 bp, Homo sapiens
gttgcagatatatag

SEQ ID NO: 165975 - DNA, 15 bp, Homo sapiens
ttgcagatatataga

SEQ ID NO: 165976 - DNA, 15 bp, Homo sapiens
tgcagatatatagaa

SEQ ID NO: 165977 - DNA, 15 bp, Homo sapiens
gcagatatatagaag

SEQ ID NO: 165978 - DNA, 15 bp, Homo sapiens
cagatatatagaagg

SEQ ID NO: 165979 - DNA, 15 bp, Homo sapiens
agatatatagaagga

SEQ ID NO: 165980 - DNA, 15 bp, Homo sapiens
gatatatagaaggaa

SEQ ID NO: 165981 - DNA, 15 bp, Homo sapiens
atatatagaaggaag

SEQ ID NO: 165982 - DNA, 15 bp, Homo sapiens
tatatagaaggaagc

SEQ ID NO: 165983 - DNA, 15 bp, Homo sapiens
atatagaaggaagcg

SEQ ID NO: 165984 - DNA, 15 bp, Homo sapiens
tatagaaggaagcgg

SEQ ID NO: 165985 - DNA, 15 bp, Homo sapiens
atagaaggaagcgga

SEQ ID NO: 165986 - DNA, 15 bp, Homo sapiens
tagaaggaagcggaa

SEQ ID NO: 165987 - DNA, 15 bp, Homo sapiens
agaaggaagcggaag

SEQ ID NO: 165988 - DNA, 15 bp, Homo sapiens
gaaggaagcggaagc

SEQ ID NO: 165989 - DNA, 15 bp, Homo sapiens
aaggaagcggaagcc

SEQ ID NO: 165990 - DNA, 15 bp, Homo sapiens
aggaagcggaagcct

SEQ ID NO: 165991 - DNA, 15 bp, Homo sapiens
ggaagcggaagcctg

SEQ ID NO: 165992 - DNA, 15 bp, Homo sapiens
gaagcggaagcctgc

SEQ ID NO: 165993 - DNA, 15 bp, Homo sapiens
aagcggaagcctgct

SEQ ID NO: 165994 - DNA, 15 bp, Homo sapiens
agcggaagcctgctg

SEQ ID NO: 165995 - DNA, 15 bp, Homo sapiens
gcggaagcctgctgt

SEQ ID NO: 165996 - DNA, 15 bp, Homo sapiens
cggaagcctgctgtt

SEQ ID NO: 165997 - DNA, 15 bp, Homo sapiens
ggaagcctgctgttg

SEQ ID NO: 165998 - DNA, 15 bp, Homo sapiens
gaagcctgctgttga

SEQ ID NO: 165999 - DNA, 15 bp, Homo sapiens
aagcctgctgttgac

SEQ ID NO: 166000 - DNA, 15 bp, Homo sapiens
agcctgctgttgaca

SEQ ID NO: 166001 - DNA, 15 bp, Homo sapiens
gcctgctgttgacag

SEQ ID NO: 166002 - DNA, 15 bp, Homo sapiens
cctgctgttgacagg

SEQ ID NO: 166003 - DNA, 15 bp, Homo sapiens
ctgctgttgacagga

SEQ ID NO: 166004 - DNA, 15 bp, Homo sapiens
tgctgttgacaggat

SEQ ID NO: 166005 - DNA, 15 bp, Homo sapiens
gctgttgacaggatt

SEQ ID NO: 166006 - DNA, 15 bp, Homo sapiens
ctgttgacaggattt

SEQ ID NO: 166007 - DNA, 15 bp, Homo sapiens
tgttgacaggatttg

SEQ ID NO: 166008 - DNA, 15 bp, Homo sapiens
gttgacaggatttgc

SEQ ID NO: 166009 - DNA, 15 bp, Homo sapiens
ttgacaggatttgcg

SEQ ID NO: 166010 - DNA, 15 bp, Homo sapiens
tgacaggatttgcgt

SEQ ID NO: 166011 - DNA, 15 bp, Homo sapiens
gacaggatttgcgtg

SEQ ID NO: 166012 - DNA, 15 bp, Homo sapiens
acaggatttgcgtgg

SEQ ID NO: 166013 - DNA, 15 bp, Homo sapiens
caggatttgcgtggg

SEQ ID NO: 166014 - DNA, 15 bp, Homo sapiens
aggatttgcgtgggc

SEQ ID NO: 166015 - DNA, 15 bp, Homo sapiens
ggatttgcgtgggca

SEQ ID NO: 166016 - DNA, 15 bp, Homo sapiens
gatttgcgtgggcat

SEQ ID NO: 166017 - DNA, 15 bp, Homo sapiens
atttgcgtgggcatt

SEQ ID NO: 166018 - DNA, 15 bp, Homo sapiens
tttgcgtgggcattc

SEQ ID NO: 166019 - DNA, 15 bp, Homo sapiens
ttgcgtgggcattcc

SEQ ID NO: 166020 - DNA, 15 bp, Homo sapiens
tgcgtgggcattcct

SEQ ID NO: 166021 - DNA, 15 bp, Homo sapiens
gcgtgggcattcctc

SEQ ID NO: 166022 - DNA, 15 bp, Homo sapiens
cgtgggcattcctcc

SEQ ID NO: 166023 - DNA, 15 bp, Homo sapiens
gtgggcattcctcct

SEQ ID NO: 166024 - DNA, 15 bp, Homo sapiens
tgggcattcctcctg

SEQ ID NO: 166025 - DNA, 15 bp, Homo sapiens
gggcattcctcctgg

SEQ ID NO: 166026 - DNA, 15 bp, Homo sapiens
ggcattcctcctggt

SEQ ID NO: 166027 - DNA, 15 bp, Homo sapiens
gcattcctcctggtg

SEQ ID NO: 166028 - DNA, 15 bp, Homo sapiens
cattcctcctggtga

SEQ ID NO: 166029 - DNA, 15 bp, Homo sapiens
attcctcctggtgag

SEQ ID NO: 166030 - DNA, 15 bp, Homo sapiens
ttcctcctggtgagg

SEQ ID NO: 166031 - DNA, 15 bp, Homo sapiens
tcctcctggtgaggt

SEQ ID NO: 166032 - DNA, 15 bp, Homo sapiens
cctcctggtgaggta

SEQ ID NO: 166033 - DNA, 15 bp, Homo sapiens
ctcctggtgaggtaa

SEQ ID NO: 166034 - DNA, 15 bp, Homo sapiens
tcctggtgaggtaaa

SEQ ID NO: 166035 - DNA, 15 bp, Homo sapiens
cctggtgaggtaaag

SEQ ID NO: 166036 - DNA, 15 bp, Homo sapiens
ctggtgaggtaaaga

SEQ ID NO: 166037 - DNA, 15 bp, Homo sapiens
tggtgaggtaaagac

SEQ ID NO: 166038 - DNA, 15 bp, Homo sapiens
ggtgaggtaaagaca

SEQ ID NO: 166039 - DNA, 15 bp, Homo sapiens
gtgaggtaaagacac

SEQ ID NO: 166040 - DNA, 15 bp, Homo sapiens
tgaggtaaagacact

SEQ ID NO: 166041 - DNA, 15 bp, Homo sapiens
gaggtaaagacactt

SEQ ID NO: 166042 - DNA, 15 bp, Homo sapiens
aggtaaagacacttt

SEQ ID NO: 166043 - DNA, 15 bp, Homo sapiens
ggtaaagacactttg

SEQ ID NO: 166044 - DNA, 15 bp, Homo sapiens
gtaaagacactttgt

SEQ ID NO: 166045 - DNA, 15 bp, Homo sapiens
taaagacactttgtc

SEQ ID NO: 166046 - DNA, 15 bp, Homo sapiens
aaagacactttgtct

SEQ ID NO: 166047 - DNA, 15 bp, Homo sapiens
aagacactttgtcta

SEQ ID NO: 166048 - DNA, 15 bp, Homo sapiens
agacactttgtctat

SEQ ID NO: 166049 - DNA, 15 bp, Homo sapiens
gacactttgtctata

SEQ ID NO: 166050 - DNA, 15 bp, Homo sapiens
acactttgtctatat

SEQ ID NO: 166051 - DNA, 15 bp, Homo sapiens
cactttgtctatatt

SEQ ID NO: 166052 - DNA, 15 bp, Homo sapiens
actttgtctatattg

SEQ ID NO: 166053 - DNA, 15 bp, Homo sapiens
ctttgtctatattgc

SEQ ID NO: 166054 - DNA, 15 bp, Homo sapiens
tttgtctatattgcg

SEQ ID NO: 166055 - DNA, 15 bp, Homo sapiens
ttgtctatattgcgt

SEQ ID NO: 166056 - DNA, 15 bp, Homo sapiens
tgtctatattgcgtt

SEQ ID NO: 166057 - DNA, 15 bp, Homo sapiens
gtctatattgcgttt

SEQ ID NO: 166058 - DNA, 15 bp, Homo sapiens
tctatattgcgtttg

SEQ ID NO: 166059 - DNA, 15 bp, Homo sapiens
ctatattgcgtttgt

SEQ ID NO: 166060 - DNA, 15 bp, Homo sapiens
tatattgcgtttgtc

SEQ ID NO: 166061 - DNA, 15 bp, Homo sapiens
atattgcgtttgtcc

SEQ ID NO: 166062 - DNA, 15 bp, Homo sapiens
tattgcgtttgtccc

SEQ ID NO: 166063 - DNA, 15 bp, Homo sapiens
attgcgtttgtccct

SEQ ID NO: 166064 - DNA, 15 bp, Homo sapiens
ttgcgtttgtcccta

SEQ ID NO: 166065 - DNA, 15 bp, Homo sapiens
tgcgtttgtccctat

SEQ ID NO: 166066 - DNA, 15 bp, Homo sapiens
gcgtttgtccctatt

SEQ ID NO: 166067 - DNA, 15 bp, Homo sapiens
cgtttgtccctatta

SEQ ID NO: 166068 - DNA, 15 bp, Homo sapiens
gtttgtccctattag

SEQ ID NO: 166069 - DNA, 15 bp, Homo sapiens
tttgtccctattagt

SEQ ID NO: 166070 - DNA, 15 bp, Homo sapiens
ttgtccctattagtt

SEQ ID NO: 166071 - DNA, 15 bp, Homo sapiens
tgtccctattagttc

SEQ ID NO: 166072 - DNA, 15 bp, Homo sapiens
gtccctattagttca

SEQ ID NO: 166073 - DNA, 15 bp, Homo sapiens
tccctattagttcag

SEQ ID NO: 166074 - DNA, 15 bp, Homo sapiens
ccctattagttcaga

SEQ ID NO: 166075 - DNA, 15 bp, Homo sapiens
cctattagttcagac

SEQ ID NO: 166076 - DNA, 15 bp, Homo sapiens
ctattagttcagact

SEQ ID NO: 166077 - DNA, 15 bp, Homo sapiens
tattagttcagacta

SEQ ID NO: 166078 - DNA, 15 bp, Homo sapiens
attagttcagactat

SEQ ID NO: 166079 - DNA, 15 bp, Homo sapiens
ttagttcagactatc

SEQ ID NO: 166080 - DNA, 15 bp, Homo sapiens
tagttcagactatct

SEQ ID NO: 166081 - DNA, 15 bp, Homo sapiens
agttcagactatctc

SEQ ID NO: 166082 - DNA, 15 bp, Homo sapiens
gttcagactatctct

SEQ ID NO: 166083 - DNA, 15 bp, Homo sapiens
ttcagactatctcta

SEQ ID NO: 166084 - DNA, 15 bp, Homo sapiens
tcagactatctctac

SEQ ID NO: 166085 - DNA, 15 bp, Homo sapiens
cagactatctctacc

SEQ ID NO: 166086 - DNA, 15 bp, Homo sapiens
agactatctctaccc

SEQ ID NO: 166087 - DNA, 15 bp, Homo sapiens
gactatctctaccca

SEQ ID NO: 166088 - DNA, 15 bp, Homo sapiens
actatctctacccaa

SEQ ID NO: 166089 - DNA, 15 bp, Homo sapiens
ctatctctacccaat

SEQ ID NO: 166090 - DNA, 15 bp, Homo sapiens
tatctctacccaatc

SEQ ID NO: 166091 - DNA, 15 bp, Homo sapiens
atctctacccaatca

SEQ ID NO: 166092 - DNA, 15 bp, Homo sapiens
tctctacccaatcaa

SEQ ID NO: 166093 - DNA, 15 bp, Homo sapiens
ctctacccaatcaag

SEQ ID NO: 166094 - DNA, 15 bp, Homo sapiens
tctacccaatcaagc

SEQ ID NO: 166095 - DNA, 15 bp, Homo sapiens
ctacccaatcaagca

SEQ ID NO: 166096 - DNA, 15 bp, Homo sapiens
tacccaatcaagcaa

SEQ ID NO: 166097 - DNA, 15 bp, Homo sapiens
acccaatcaagcaac

SEQ ID NO: 166098 - DNA, 15 bp, Homo sapiens
cccaatcaagcaacg

SEQ ID NO: 166099 - DNA, 15 bp, Homo sapiens
ccaatcaagcaacga

SEQ ID NO: 166100 - DNA, 15 bp, Homo sapiens
caatcaagcaacgat

SEQ ID NO: 166101 - DNA, 15 bp, Homo sapiens
aatcaagcaacgatg

SEQ ID NO: 166102 - DNA, 15 bp, Homo sapiens
atcaagcaacgatgc

SEQ ID NO: 166103 - DNA, 15 bp, Homo sapiens
tcaagcaacgatgct

SEQ ID NO: 166104 - DNA, 15 bp, Homo sapiens
caagcaacgatgctc

SEQ ID NO: 166105 - DNA, 15 bp, Homo sapiens
aagcaacgatgctcg

SEQ ID NO: 166106 - DNA, 15 bp, Homo sapiens
agcaacgatgctcgt

SEQ ID NO: 166107 - DNA, 15 bp, Homo sapiens
gcaacgatgctcgtt

SEQ ID NO: 166108 - DNA, 15 bp, Homo sapiens
caacgatgctcgtta

SEQ ID NO: 166109 - DNA, 15 bp, Homo sapiens
aacgatgctcgttaa

SEQ ID NO: 166110 - DNA, 15 bp, Homo sapiens
acgatgctcgttaag

SEQ ID NO: 166111 - DNA, 15 bp, Homo sapiens
cgatgctcgttaaga

SEQ ID NO: 166112 - DNA, 15 bp, Homo sapiens
gatgctcgttaagag

SEQ ID NO: 166113 - DNA, 15 bp, Homo sapiens
atgctcgttaagagg

SEQ ID NO: 166114 - DNA, 15 bp, Homo sapiens
tgctcgttaagaggt

SEQ ID NO: 166115 - DNA, 15 bp, Homo sapiens
gctcgttaagaggta

SEQ ID NO: 166116 - DNA, 15 bp, Homo sapiens
ctcgttaagaggtaa

SEQ ID NO: 166117 - DNA, 15 bp, Homo sapiens
tcgttaagaggtaaa

SEQ ID NO: 166118 - DNA, 15 bp, Homo sapiens
cgttaagaggtaaaa

SEQ ID NO: 166119 - DNA, 15 bp, Homo sapiens
gttaagaggtaaaag

SEQ ID NO: 166120 - DNA, 15 bp, Homo sapiens
ttaagaggtaaaagt

SEQ ID NO: 166121 - DNA, 15 bp, Homo sapiens
taagaggtaaaagtg

SEQ ID NO: 166122 - DNA, 15 bp, Homo sapiens
aagaggtaaaagtgg

SEQ ID NO: 166123 - DNA, 15 bp, Homo sapiens
agaggtaaaagtgga

SEQ ID NO: 166124 - DNA, 15 bp, Homo sapiens
gaggtaaaagtggat

SEQ ID NO: 166125 - DNA, 15 bp, Homo sapiens
aggtaaaagtggatt

SEQ ID NO: 166126 - DNA, 15 bp, Homo sapiens
ggtaaaagtggattt

SEQ ID NO: 166127 - DNA, 15 bp, Homo sapiens
gtaaaagtggatttt

SEQ ID NO: 166128 - DNA, 15 bp, Homo sapiens
taaaagtggatttta

SEQ ID NO: 166129 - DNA, 15 bp, Homo sapiens
aaaagtggattttaa

SEQ ID NO: 166130 - DNA, 15 bp, Homo sapiens
aaagtggattttaaa

SEQ ID NO: 166131 - DNA, 15 bp, Homo sapiens
aagtggattttaaag

SEQ ID NO: 166132 - DNA, 15 bp, Homo sapiens
agtggattttaaagg

SEQ ID NO: 166133 - DNA, 15 bp, Homo sapiens
gtggattttaaaggc

SEQ ID NO: 166134 - DNA, 15 bp, Homo sapiens
tggattttaaaggct

SEQ ID NO: 166135 - DNA, 15 bp, Homo sapiens
ggattttaaaggctt

SEQ ID NO: 166136 - DNA, 15 bp, Homo sapiens
gattttaaaggcttc

SEQ ID NO: 166137 - DNA, 15 bp, Homo sapiens
attttaaaggcttct

SEQ ID NO: 166138 - DNA, 15 bp, Homo sapiens
ttttaaaggcttctg

SEQ ID NO: 166139 - DNA, 15 bp, Homo sapiens
tttaaaggcttctgt

SEQ ID NO: 166140 - DNA, 15 bp, Homo sapiens
ttaaaggcttctgta

SEQ ID NO: 166141 - DNA, 15 bp, Homo sapiens
taaaggcttctgtat

SEQ ID NO: 166142 - DNA, 15 bp, Homo sapiens
aaaggcttctgtatt

SEQ ID NO: 166143 - DNA, 15 bp, Homo sapiens
aaggcttctgtattt

SEQ ID NO: 166144 - DNA, 15 bp, Homo sapiens
aggcttctgtattta

SEQ ID NO: 166145 - DNA, 15 bp, Homo sapiens
ggcttctgtatttat

SEQ ID NO: 166146 - DNA, 15 bp, Homo sapiens
gcttctgtatttatg

SEQ ID NO: 166147 - DNA, 15 bp, Homo sapiens
cttctgtatttatgc

SEQ ID NO: 166148 - DNA, 15 bp, Homo sapiens
ttctgtatttatgcc

SEQ ID NO: 166149 - DNA, 15 bp, Homo sapiens
tctgtatttatgcca

SEQ ID NO: 166150 - DNA, 15 bp, Homo sapiens
ctgtatttatgccag

SEQ ID NO: 166151 - DNA, 15 bp, Homo sapiens
tgtatttatgccagg

SEQ ID NO: 166152 - DNA, 15 bp, Homo sapiens
gtatttatgccagga

SEQ ID NO: 166153 - DNA, 15 bp, Homo sapiens
tatttatgccaggat

SEQ ID NO: 166154 - DNA, 15 bp, Homo sapiens
atttatgccaggatg

SEQ ID NO: 166155 - DNA, 15 bp, Homo sapiens
tttatgccaggatgg

SEQ ID NO: 166156 - DNA, 15 bp, Homo sapiens
ttatgccaggatgga

SEQ ID NO: 166157 - DNA, 15 bp, Homo sapiens
tatgccaggatggag

SEQ ID NO: 166158 - DNA, 15 bp, Homo sapiens
atgccaggatggagc

SEQ ID NO: 166159 - DNA, 15 bp, Homo sapiens
tgccaggatggagca

SEQ ID NO: 166160 - DNA, 15 bp, Homo sapiens
gccaggatggagcaa

SEQ ID NO: 166161 - DNA, 15 bp, Homo sapiens
ccaggatggagcaat

SEQ ID NO: 166162 - DNA, 15 bp, Homo sapiens
caggatggagcaatt

SEQ ID NO: 166163 - DNA, 15 bp, Homo sapiens
aggatggagcaatta

SEQ ID NO: 166164 - DNA, 15 bp, Homo sapiens
ggatggagcaattag

SEQ ID NO: 166165 - DNA, 15 bp, Homo sapiens
gatggagcaattagt

SEQ ID NO: 166166 - DNA, 15 bp, Homo sapiens
atggagcaattagtc

SEQ ID NO: 166167 - DNA, 15 bp, Homo sapiens
tggagcaattagtca

SEQ ID NO: 166168 - DNA, 15 bp, Homo sapiens
ggagcaattagtcat

SEQ ID NO: 166169 - DNA, 15 bp, Homo sapiens
gagcaattagtcatc

SEQ ID NO: 166170 - DNA, 15 bp, Homo sapiens
agcaattagtcatcg

SEQ ID NO: 166171 - DNA, 15 bp, Homo sapiens
gcaattagtcatcga

SEQ ID NO: 166172 - DNA, 15 bp, Homo sapiens
caattagtcatcgag

SEQ ID NO: 166173 - DNA, 15 bp, Homo sapiens
aattagtcatcgaga

SEQ ID NO: 166174 - DNA, 15 bp, Homo sapiens
attagtcatcgagaa

SEQ ID NO: 166175 - DNA, 15 bp, Homo sapiens
ttagtcatcgagaag

SEQ ID NO: 166176 - DNA, 15 bp, Homo sapiens
tagtcatcgagaaga

SEQ ID NO: 166177 - DNA, 15 bp, Homo sapiens
agtcatcgagaagag

SEQ ID NO: 166178 - DNA, 15 bp, Homo sapiens
gtcatcgagaagaga

SEQ ID NO: 166179 - DNA, 15 bp, Homo sapiens
tcatcgagaagagag

SEQ ID NO: 166180 - DNA, 15 bp, Homo sapiens
catcgagaagagagg

SEQ ID NO: 166181 - DNA, 15 bp, Homo sapiens
atcgagaagagaggg

SEQ ID NO: 166182 - DNA, 15 bp, Homo sapiens
tcgagaagagaggga

SEQ ID NO: 166183 - DNA, 15 bp, Homo sapiens
cgagaagagagggac

SEQ ID NO: 166184 - DNA, 15 bp, Homo sapiens
gagaagagagggacc

SEQ ID NO: 166185 - DNA, 15 bp, Homo sapiens
agaagagagggaccc

SEQ ID NO: 166186 - DNA, 15 bp, Homo sapiens
gaagagagggaccct

SEQ ID NO: 166187 - DNA, 15 bp, Homo sapiens
aagagagggaccctg

SEQ ID NO: 166188 - DNA, 15 bp, Homo sapiens
agagagggaccctgt

SEQ ID NO: 166189 - DNA, 15 bp, Homo sapiens
gagagggaccctgta

SEQ ID NO: 166190 - DNA, 15 bp, Homo sapiens
agagggaccctgtat

SEQ ID NO: 166191 - DNA, 15 bp, Homo sapiens
gagggaccctgtatg

SEQ ID NO: 166192 - DNA, 15 bp, Homo sapiens
agggaccctgtatgt

SEQ ID NO: 166193 - DNA, 15 bp, Homo sapiens
gggaccctgtatgtc

SEQ ID NO: 166194 - DNA, 15 bp, Homo sapiens
ggaccctgtatgtca

SEQ ID NO: 166195 - DNA, 15 bp, Homo sapiens
gaccctgtatgtcaa

SEQ ID NO: 166196 - DNA, 15 bp, Homo sapiens
accctgtatgtcaag

SEQ ID NO: 166197 - DNA, 15 bp, Homo sapiens
ccctgtatgtcaaga

SEQ ID NO: 166198 - DNA, 15 bp, Homo sapiens
cctgtatgtcaagag

SEQ ID NO: 166199 - DNA, 15 bp, Homo sapiens
ctgtatgtcaagaga

SEQ ID NO: 166200 - DNA, 15 bp, Homo sapiens
tgtatgtcaagagaa

SEQ ID NO: 166201 - DNA, 15 bp, Homo sapiens
gtatgtcaagagaat

SEQ ID NO: 166202 - DNA, 15 bp, Homo sapiens
tatgtcaagagaatg

SEQ ID NO: 166203 - DNA, 15 bp, Homo sapiens
atgtcaagagaatga

SEQ ID NO: 166204 - DNA, 15 bp, Homo sapiens
tgtcaagagaatgat

SEQ ID NO: 166205 - DNA, 15 bp, Homo sapiens
gtcaagagaatgatt

SEQ ID NO: 166206 - DNA, 15 bp, Homo sapiens
tcaagagaatgattt

SEQ ID NO: 166207 - DNA, 15 bp, Homo sapiens
caagagaatgatttc

SEQ ID NO: 166208 - DNA, 15 bp, Homo sapiens
aagagaatgatttca

SEQ ID NO: 166209 - DNA, 15 bp, Homo sapiens
agagaatgatttcag

SEQ ID NO: 166210 - DNA, 15 bp, Homo sapiens
gagaatgatttcaga

SEQ ID NO: 166211 - DNA, 15 bp, Homo sapiens
agaatgatttcagag

SEQ ID NO: 166212 - DNA, 15 bp, Homo sapiens
gaatgatttcagaga

SEQ ID NO: 166213 - DNA, 15 bp, Homo sapiens
aatgatttcagagaa

SEQ ID NO: 166214 - DNA, 15 bp, Homo sapiens
atgatttcagagaat

SEQ ID NO: 166215 - DNA, 15 bp, Homo sapiens
tgatttcagagaatc

SEQ ID NO: 166216 - DNA, 15 bp, Homo sapiens
gatttcagagaatcc

SEQ ID NO: 166217 - DNA, 15 bp, Homo sapiens
atttcagagaatcca

SEQ ID NO: 166218 - DNA, 15 bp, Homo sapiens
tttcagagaatccaa

SEQ ID NO: 166219 - DNA, 15 bp, Homo sapiens
ttcagagaatccaat

SEQ ID NO: 166220 - DNA, 15 bp, Homo sapiens
tcagagaatccaata

SEQ ID NO: 166221 - DNA, 15 bp, Homo sapiens
cagagaatccaatac

SEQ ID NO: 166222 - DNA, 15 bp, Homo sapiens
agagaatccaataca

SEQ ID NO: 166223 - DNA, 15 bp, Homo sapiens
gagaatccaatacaa

SEQ ID NO: 166224 - DNA, 15 bp, Homo sapiens
agaatccaatacaat

SEQ ID NO: 166225 - DNA, 15 bp, Homo sapiens
gaatccaatacaatt

SEQ ID NO: 166226 - DNA, 15 bp, Homo sapiens
aatccaatacaattt

SEQ ID NO: 166227 - DNA, 15 bp, Homo sapiens
atccaatacaattta

SEQ ID NO: 166228 - DNA, 15 bp, Homo sapiens
tccaatacaatttaa

SEQ ID NO: 166229 - DNA, 15 bp, Homo sapiens
ccaatacaatttaag

SEQ ID NO: 166230 - DNA, 15 bp, Homo sapiens
caatacaatttaaga

SEQ ID NO: 166231 - DNA, 15 bp, Homo sapiens
aatacaatttaagaa

SEQ ID NO: 166232 - DNA, 15 bp, Homo sapiens
atacaatttaagaaa

SEQ ID NO: 166233 - DNA, 15 bp, Homo sapiens
tacaatttaagaaaa

SEQ ID NO: 166234 - DNA, 15 bp, Homo sapiens
acaatttaagaaaaa

SEQ ID NO: 166235 - DNA, 15 bp, Homo sapiens
caatttaagaaaaag

SEQ ID NO: 166236 - DNA, 15 bp, Homo sapiens
aatttaagaaaaagc

SEQ ID NO: 166237 - DNA, 15 bp, Homo sapiens
atttaagaaaaagca

SEQ ID NO: 166238 - DNA, 15 bp, Homo sapiens
tttaagaaaaagcat

SEQ ID NO: 166239 - DNA, 15 bp, Homo sapiens
ttaagaaaaagcatg

SEQ ID NO: 166240 - DNA, 15 bp, Homo sapiens
taagaaaaagcatgg

SEQ ID NO: 166241 - DNA, 15 bp, Homo sapiens
aagaaaaagcatggg

SEQ ID NO: 166242 - DNA, 15 bp, Homo sapiens
agaaaaagcatgggg

SEQ ID NO: 166243 - DNA, 15 bp, Homo sapiens
gaaaaagcatggggc

SEQ ID NO: 166244 - DNA, 15 bp, Homo sapiens
aaaaagcatggggct

SEQ ID NO: 166245 - DNA, 15 bp, Homo sapiens
aaaagcatggggctg

SEQ ID NO: 166246 - DNA, 15 bp, Homo sapiens
aaagcatggggctgg

SEQ ID NO: 166247 - DNA, 15 bp, Homo sapiens
aagcatggggctggg

SEQ ID NO: 166248 - DNA, 15 bp, Homo sapiens
agcatggggctgggc

SEQ ID NO: 166249 - DNA, 15 bp, Homo sapiens
gcatggggctgggcg

SEQ ID NO: 166250 - DNA, 15 bp, Homo sapiens
catggggctgggcgc

SEQ ID NO: 166251 - DNA, 15 bp, Homo sapiens
atggggctgggcgca

SEQ ID NO: 166252 - DNA, 15 bp, Homo sapiens
ggctgggcgcagtga

SEQ ID NO: 166253 - DNA, 15 bp, Homo sapiens
gctgggcgcagtgat

SEQ ID NO: 166254 - DNA, 15 bp, Homo sapiens
ctgggcgcagtgatt

SEQ ID NO: 166255 - DNA, 15 bp, Homo sapiens
tgggcgcagtgattc

SEQ ID NO: 166256 - DNA, 15 bp, Homo sapiens
gggcgcagtgattca

SEQ ID NO: 166257 - DNA, 15 bp, Homo sapiens
ggcgcagtgattcac

SEQ ID NO: 166258 - DNA, 15 bp, Homo sapiens
gcgcagtgattcact

SEQ ID NO: 166259 - DNA, 15 bp, Homo sapiens
cgcagtgattcactc

SEQ ID NO: 166260 - DNA, 15 bp, Homo sapiens
gcagtgattcactcc

SEQ ID NO: 166261 - DNA, 15 bp, Homo sapiens
cagtgattcactcct

SEQ ID NO: 166262 - DNA, 15 bp, Homo sapiens
agtgattcactcctg

SEQ ID NO: 166263 - DNA, 15 bp, Homo sapiens
gtgattcactcctgt

SEQ ID NO: 166264 - DNA, 15 bp, Homo sapiens
tgattcactcctgta

SEQ ID NO: 166265 - DNA, 15 bp, Homo sapiens
gattcactcctgtaa

SEQ ID NO: 166266 - DNA, 15 bp, Homo sapiens
attcactcctgtaat

SEQ ID NO: 166267 - DNA, 15 bp, Homo sapiens
ttcactcctgtaatc

SEQ ID NO: 166268 - DNA, 15 bp, Homo sapiens
tcactcctgtaatcc

SEQ ID NO: 166269 - DNA, 15 bp, Homo sapiens
cactcctgtaatccc

SEQ ID NO: 166270 - DNA, 15 bp, Homo sapiens
actcctgtaatccca

SEQ ID NO: 166271 - DNA, 15 bp, Homo sapiens
ctcctgtaatcccag

SEQ ID NO: 166272 - DNA, 15 bp, Homo sapiens
tcctgtaatcccagc

SEQ ID NO: 166273 - DNA, 15 bp, Homo sapiens
ctttgggaggccgag

SEQ ID NO: 166274 - DNA, 15 bp, Homo sapiens
tttgggaggccgagg

SEQ ID NO: 166275 - DNA, 15 bp, Homo sapiens
ttgggaggccgaggt

SEQ ID NO: 166276 - DNA, 15 bp, Homo sapiens
tgggaggccgaggtg

SEQ ID NO: 166277 - DNA, 15 bp, Homo sapiens
gggaggccgaggtgg

SEQ ID NO: 166278 - DNA, 15 bp, Homo sapiens
ggaggccgaggtggg

SEQ ID NO: 166279 - DNA, 15 bp, Homo sapiens
aggccgaggtgggcg

SEQ ID NO: 166280 - DNA, 15 bp, Homo sapiens
ggccgaggtgggcgg

SEQ ID NO: 166281 - DNA, 15 bp, Homo sapiens
gccgaggtgggcgga

SEQ ID NO: 166282 - DNA, 15 bp, Homo sapiens
cgaggtcaggagatt

SEQ ID NO: 166283 - DNA, 15 bp, Homo sapiens
gaggtcaggagattg

SEQ ID NO: 166284 - DNA, 15 bp, Homo sapiens
aggtcaggagattga

SEQ ID NO: 166285 - DNA, 15 bp, Homo sapiens
ggtcaggagattgag

SEQ ID NO: 166286 - DNA, 15 bp, Homo sapiens
gtcaggagattgaga

SEQ ID NO: 166287 - DNA, 15 bp, Homo sapiens
tcaggagattgagac

SEQ ID NO: 166288 - DNA, 15 bp, Homo sapiens
caggagattgagacc

SEQ ID NO: 166289 - DNA, 15 bp, Homo sapiens
aggagattgagacca

SEQ ID NO: 166290 - DNA, 15 bp, Homo sapiens
ggagattgagaccat

SEQ ID NO: 166291 - DNA, 15 bp, Homo sapiens
gagattgagaccatc

SEQ ID NO: 166292 - DNA, 15 bp, Homo sapiens
agattgagaccatcc

SEQ ID NO: 166293 - DNA, 15 bp, Homo sapiens
gattgagaccatcct

SEQ ID NO: 166294 - DNA, 15 bp, Homo sapiens
ccccatctctactat

SEQ ID NO: 166295 - DNA, 15 bp, Homo sapiens
cccatctctactata

SEQ ID NO: 166296 - DNA, 15 bp, Homo sapiens
ccatctctactataa

SEQ ID NO: 166297 - DNA, 15 bp, Homo sapiens
catctctactataaa

SEQ ID NO: 166298 - DNA, 15 bp, Homo sapiens
atctctactataaat

SEQ ID NO: 166299 - DNA, 15 bp, Homo sapiens
tctctactataaata

SEQ ID NO: 166300 - DNA, 15 bp, Homo sapiens
ctctactataaatac

SEQ ID NO: 166301 - DNA, 15 bp, Homo sapiens
tctactataaataca

SEQ ID NO: 166302 - DNA, 15 bp, Homo sapiens
ctactataaatacaa

SEQ ID NO: 166303 - DNA, 15 bp, Homo sapiens
tactataaatacaaa

SEQ ID NO: 166304 - DNA, 15 bp, Homo sapiens
actataaatacaaaa

SEQ ID NO: 166305 - DNA, 15 bp, Homo sapiens
ctataaatacaaaaa

SEQ ID NO: 166306 - DNA, 15 bp, Homo sapiens
tataaatacaaaaat

SEQ ID NO: 166307 - DNA, 15 bp, Homo sapiens
ataaatacaaaaatt

SEQ ID NO: 166308 - DNA, 15 bp, Homo sapiens
taaatacaaaaatta

SEQ ID NO: 166309 - DNA, 15 bp, Homo sapiens
aaaattagctgggca

SEQ ID NO: 166310 - DNA, 15 bp, Homo sapiens
aaattagctgggcat

SEQ ID NO: 166311 - DNA, 15 bp, Homo sapiens
aattagctgggcata

SEQ ID NO: 166312 - DNA, 15 bp, Homo sapiens
attagctgggcatag

SEQ ID NO: 166313 - DNA, 15 bp, Homo sapiens
ttagctgggcatagt

SEQ ID NO: 166314 - DNA, 15 bp, Homo sapiens
tagctgggcatagta

SEQ ID NO: 166315 - DNA, 15 bp, Homo sapiens
agctgggcatagtag

SEQ ID NO: 166316 - DNA, 15 bp, Homo sapiens
gctgggcatagtagt

SEQ ID NO: 166317 - DNA, 15 bp, Homo sapiens
ctgggcatagtagtg

SEQ ID NO: 166318 - DNA, 15 bp, Homo sapiens
tgggcatagtagtgc

SEQ ID NO: 166319 - DNA, 15 bp, Homo sapiens
gggcatagtagtgca

SEQ ID NO: 166320 - DNA, 15 bp, Homo sapiens
ggcatagtagtgcat

SEQ ID NO: 166321 - DNA, 15 bp, Homo sapiens
gcatagtagtgcatt

SEQ ID NO: 166322 - DNA, 15 bp, Homo sapiens
catagtagtgcattc

SEQ ID NO: 166323 - DNA, 15 bp, Homo sapiens
atagtagtgcattcc

SEQ ID NO: 166324 - DNA, 15 bp, Homo sapiens
tagtagtgcattcct

SEQ ID NO: 166325 - DNA, 15 bp, Homo sapiens
agtagtgcattcctg

SEQ ID NO: 166326 - DNA, 15 bp, Homo sapiens
gtagtgcattcctgt

SEQ ID NO: 166327 - DNA, 15 bp, Homo sapiens
tagtgcattcctgta

SEQ ID NO: 166328 - DNA, 15 bp, Homo sapiens
agtgcattcctgtag

SEQ ID NO: 166329 - DNA, 15 bp, Homo sapiens
gtgcattcctgtagt

SEQ ID NO: 166330 - DNA, 15 bp, Homo sapiens
tgcattcctgtagtc

SEQ ID NO: 166331 - DNA, 15 bp, Homo sapiens
gcattcctgtagtcc

SEQ ID NO: 166332 - DNA, 15 bp, Homo sapiens
cattcctgtagtccc

SEQ ID NO: 166333 - DNA, 15 bp, Homo sapiens
attcctgtagtccca

SEQ ID NO: 166334 - DNA, 15 bp, Homo sapiens
ttcctgtagtcccag

SEQ ID NO: 166335 - DNA, 15 bp, Homo sapiens
aattgcttgaaccta

SEQ ID NO: 166336 - DNA, 15 bp, Homo sapiens
attgcttgaacctag

SEQ ID NO: 166337 - DNA, 15 bp, Homo sapiens
ttgcttgaacctagg

SEQ ID NO: 166338 - DNA, 15 bp, Homo sapiens
tgcttgaacctagga

SEQ ID NO: 166339 - DNA, 15 bp, Homo sapiens
gcttgaacctaggag

SEQ ID NO: 166340 - DNA, 15 bp, Homo sapiens
cttgaacctaggagg

SEQ ID NO: 166341 - DNA, 15 bp, Homo sapiens
ttgaacctaggaggg

SEQ ID NO: 166342 - DNA, 15 bp, Homo sapiens
tgaacctaggagggg

SEQ ID NO: 166343 - DNA, 15 bp, Homo sapiens
gaacctaggaggggg

SEQ ID NO: 166344 - DNA, 15 bp, Homo sapiens
aacctaggaggggga

SEQ ID NO: 166345 - DNA, 15 bp, Homo sapiens
acctaggagggggag

SEQ ID NO: 166346 - DNA, 15 bp, Homo sapiens
cctaggagggggagg

SEQ ID NO: 166347 - DNA, 15 bp, Homo sapiens
ctaggagggggaggt

SEQ ID NO: 166348 - DNA, 15 bp, Homo sapiens
taggagggggaggtt

SEQ ID NO: 166349 - DNA, 15 bp, Homo sapiens
gagggggaggttgcc

SEQ ID NO: 166350 - DNA, 15 bp, Homo sapiens
agggggaggttgccc

SEQ ID NO: 166351 - DNA, 15 bp, Homo sapiens
gggggaggttgccca

SEQ ID NO: 166352 - DNA, 15 bp, Homo sapiens
ggggaggttgcccag

SEQ ID NO: 166353 - DNA, 15 bp, Homo sapiens
gggaggttgcccaga

SEQ ID NO: 166354 - DNA, 15 bp, Homo sapiens
ggaggttgcccagat

SEQ ID NO: 166355 - DNA, 15 bp, Homo sapiens
gaggttgcccagatt

SEQ ID NO: 166356 - DNA, 15 bp, Homo sapiens
aggttgcccagattg

SEQ ID NO: 166357 - DNA, 15 bp, Homo sapiens
ggttgcccagattgc

SEQ ID NO: 166358 - DNA, 15 bp, Homo sapiens
gttgcccagattgcg

SEQ ID NO: 166359 - DNA, 15 bp, Homo sapiens
ttgcccagattgcgc

SEQ ID NO: 166360 - DNA, 15 bp, Homo sapiens
tgcccagattgcgct

SEQ ID NO: 166361 - DNA, 15 bp, Homo sapiens
gcccagattgcgctg

SEQ ID NO: 166362 - DNA, 15 bp, Homo sapiens
cccagattgcgctgc

SEQ ID NO: 166363 - DNA, 15 bp, Homo sapiens
ccagattgcgctgct

SEQ ID NO: 166364 - DNA, 15 bp, Homo sapiens
cagattgcgctgctg

SEQ ID NO: 166365 - DNA, 15 bp, Homo sapiens
agattgcgctgctgc

SEQ ID NO: 166366 - DNA, 15 bp, Homo sapiens
gattgcgctgctgca

SEQ ID NO: 166367 - DNA, 15 bp, Homo sapiens
attgcgctgctgcac

SEQ ID NO: 166368 - DNA, 15 bp, Homo sapiens
ttgcgctgctgcact

SEQ ID NO: 166369 - DNA, 15 bp, Homo sapiens
tgcgctgctgcactc

SEQ ID NO: 166370 - DNA, 15 bp, Homo sapiens
gcgctgctgcactcc

SEQ ID NO: 166371 - DNA, 15 bp, Homo sapiens
cgctgctgcactcca

SEQ ID NO: 166372 - DNA, 15 bp, Homo sapiens
gctgctgcactccag

SEQ ID NO: 166373 - DNA, 15 bp, Homo sapiens
ctgctgcactccagc

SEQ ID NO: 166374 - DNA, 15 bp, Homo sapiens
tgctgcactccagcc

SEQ ID NO: 166375 - DNA, 15 bp, Homo sapiens
gctgcactccagcct

SEQ ID NO: 166376 - DNA, 15 bp, Homo sapiens
gcactccagcctggt

SEQ ID NO: 166377 - DNA, 15 bp, Homo sapiens
cactccagcctggtg

SEQ ID NO: 166378 - DNA, 15 bp, Homo sapiens
actccagcctggtga

SEQ ID NO: 166379 - DNA, 15 bp, Homo sapiens
ctccagcctggtgac

SEQ ID NO: 166380 - DNA, 15 bp, Homo sapiens
tccagcctggtgaca

SEQ ID NO: 166381 - DNA, 15 bp, Homo sapiens
ccagcctggtgacag

SEQ ID NO: 166382 - DNA, 15 bp, Homo sapiens
cagcctggtgacaga

SEQ ID NO: 166383 - DNA, 15 bp, Homo sapiens
agcctggtgacagag

SEQ ID NO: 166384 - DNA, 15 bp, Homo sapiens
gcctggtgacagagt

SEQ ID NO: 166385 - DNA, 15 bp, Homo sapiens
cctggtgacagagtg

SEQ ID NO: 166386 - DNA, 15 bp, Homo sapiens
ctggtgacagagtga

SEQ ID NO: 166387 - DNA, 15 bp, Homo sapiens
tggtgacagagtgag

SEQ ID NO: 166388 - DNA, 15 bp, Homo sapiens
acagagtgagactca

SEQ ID NO: 166389 - DNA, 15 bp, Homo sapiens
cagagtgagactcat

SEQ ID NO: 166390 - DNA, 15 bp, Homo sapiens
agagtgagactcatg

SEQ ID NO: 166391 - DNA, 15 bp, Homo sapiens
gagtgagactcatgt

SEQ ID NO: 166392 - DNA, 15 bp, Homo sapiens
agtgagactcatgtc

SEQ ID NO: 166393 - DNA, 15 bp, Homo sapiens
gtgagactcatgtca

SEQ ID NO: 166394 - DNA, 15 bp, Homo sapiens
tgagactcatgtcaa

SEQ ID NO: 166395 - DNA, 15 bp, Homo sapiens
gagactcatgtcaac

SEQ ID NO: 166396 - DNA, 15 bp, Homo sapiens
agactcatgtcaaca

SEQ ID NO: 166397 - DNA, 15 bp, Homo sapiens
gactcatgtcaacaa

SEQ ID NO: 166398 - DNA, 15 bp, Homo sapiens
actcatgtcaacaac

SEQ ID NO: 166399 - DNA, 15 bp, Homo sapiens
ctcatgtcaacaaca

SEQ ID NO: 166400 - DNA, 15 bp, Homo sapiens
tcatgtcaacaacaa

SEQ ID NO: 166401 - DNA, 15 bp, Homo sapiens
catgtcaacaacaaa

SEQ ID NO: 166402 - DNA, 15 bp, Homo sapiens
atgtcaacaacaaaa

SEQ ID NO: 166403 - DNA, 15 bp, Homo sapiens
tgtcaacaacaaaaa

SEQ ID NO: 166404 - DNA, 15 bp, Homo sapiens
gtcaacaacaaaaac

SEQ ID NO: 166405 - DNA, 15 bp, Homo sapiens
tcaacaacaaaaaca

SEQ ID NO: 166406 - DNA, 15 bp, Homo sapiens
caacaacaaaaacag

SEQ ID NO: 166407 - DNA, 15 bp, Homo sapiens
aacaacaaaaacaga

SEQ ID NO: 166408 - DNA, 15 bp, Homo sapiens
acaacaaaaacagaa

SEQ ID NO: 166409 - DNA, 15 bp, Homo sapiens
caacaaaaacagaaa

SEQ ID NO: 166410 - DNA, 15 bp, Homo sapiens
aacaaaaacagaaaa

SEQ ID NO: 166411 - DNA, 15 bp, Homo sapiens
acaaaaacagaaaaa

SEQ ID NO: 166412 - DNA, 15 bp, Homo sapiens
caaaaacagaaaaag

SEQ ID NO: 166413 - DNA, 15 bp, Homo sapiens
aaaaacagaaaaagc

SEQ ID NO: 166414 - DNA, 15 bp, Homo sapiens
aaacagaaaaagcac

SEQ ID NO: 166415 - DNA, 15 bp, Homo sapiens
aacagaaaaagcacg

SEQ ID NO: 166416 - DNA, 15 bp, Homo sapiens
acagaaaaagcacgc

SEQ ID NO: 166417 - DNA, 15 bp, Homo sapiens
cagaaaaagcacgca

SEQ ID NO: 166418 - DNA, 15 bp, Homo sapiens
agaaaaagcacgcac

SEQ ID NO: 166419 - DNA, 15 bp, Homo sapiens
gaaaaagcacgcaca

SEQ ID NO: 166420 - DNA, 15 bp, Homo sapiens
aaaaagcacgcacat

SEQ ID NO: 166421 - DNA, 15 bp, Homo sapiens
aaaagcacgcacatc

SEQ ID NO: 166422 - DNA, 15 bp, Homo sapiens
aaagcacgcacatct

SEQ ID NO: 166423 - DNA, 15 bp, Homo sapiens
aagcacgcacatcta

SEQ ID NO: 166424 - DNA, 15 bp, Homo sapiens
agcacgcacatctaa

SEQ ID NO: 166425 - DNA, 15 bp, Homo sapiens
gcacgcacatctaaa

SEQ ID NO: 166426 - DNA, 15 bp, Homo sapiens
cacgcacatctaaaa

SEQ ID NO: 166427 - DNA, 15 bp, Homo sapiens
acgcacatctaaaac

SEQ ID NO: 166428 - DNA, 15 bp, Homo sapiens
cgcacatctaaaaca

SEQ ID NO: 166429 - DNA, 15 bp, Homo sapiens
gcacatctaaaacat

SEQ ID NO: 166430 - DNA, 15 bp, Homo sapiens
cacatctaaaacatg

SEQ ID NO: 166431 - DNA, 15 bp, Homo sapiens
acatctaaaacatgc

SEQ ID NO: 166432 - DNA, 15 bp, Homo sapiens
catctaaaacatgct

SEQ ID NO: 166433 - DNA, 15 bp, Homo sapiens
atctaaaacatgctt

SEQ ID NO: 166434 - DNA, 15 bp, Homo sapiens
tctaaaacatgcttt

SEQ ID NO: 166435 - DNA, 15 bp, Homo sapiens
ctaaaacatgctttt

SEQ ID NO: 166436 - DNA, 15 bp, Homo sapiens
taaaacatgcttttg

SEQ ID NO: 166437 - DNA, 15 bp, Homo sapiens
aaaacatgcttttgt

SEQ ID NO: 166438 - DNA, 15 bp, Homo sapiens
aaacatgcttttgtg

SEQ ID NO: 166439 - DNA, 15 bp, Homo sapiens
aacatgcttttgtga

SEQ ID NO: 166440 - DNA, 15 bp, Homo sapiens
acatgcttttgtgat

SEQ ID NO: 166441 - DNA, 15 bp, Homo sapiens
catgcttttgtgatc

SEQ ID NO: 166442 - DNA, 15 bp, Homo sapiens
atgcttttgtgatcc

SEQ ID NO: 166443 - DNA, 15 bp, Homo sapiens
tgcttttgtgatcca

SEQ ID NO: 166444 - DNA, 15 bp, Homo sapiens
gcttttgtgatccat

SEQ ID NO: 166445 - DNA, 15 bp, Homo sapiens
cttttgtgatccatt

SEQ ID NO: 166446 - DNA, 15 bp, Homo sapiens
ttttgtgatccattt

SEQ ID NO: 166447 - DNA, 15 bp, Homo sapiens
tttgtgatccatttg

SEQ ID NO: 166448 - DNA, 15 bp, Homo sapiens
ttgtgatccatttgg

SEQ ID NO: 166449 - DNA, 15 bp, Homo sapiens
tgtgatccatttggg

SEQ ID NO: 166450 - DNA, 15 bp, Homo sapiens
gtgatccatttggga

SEQ ID NO: 166451 - DNA, 15 bp, Homo sapiens
tgatccatttgggat

SEQ ID NO: 166452 - DNA, 15 bp, Homo sapiens
gatccatttgggatg

SEQ ID NO: 166453 - DNA, 15 bp, Homo sapiens
atccatttgggatgg

SEQ ID NO: 166454 - DNA, 15 bp, Homo sapiens
tccatttgggatggt

SEQ ID NO: 166455 - DNA, 15 bp, Homo sapiens
ccatttgggatggtg

SEQ ID NO: 166456 - DNA, 15 bp, Homo sapiens
catttgggatggtga

SEQ ID NO: 166457 - DNA, 15 bp, Homo sapiens
atttgggatggtgat

SEQ ID NO: 166458 - DNA, 15 bp, Homo sapiens
tttgggatggtgatg

SEQ ID NO: 166459 - DNA, 15 bp, Homo sapiens
ttgggatggtgatga

SEQ ID NO: 166460 - DNA, 15 bp, Homo sapiens
tgggatggtgatgac

SEQ ID NO: 166461 - DNA, 15 bp, Homo sapiens
gggatggtgatgaca

SEQ ID NO: 166462 - DNA, 15 bp, Homo sapiens
ggatggtgatgacat

SEQ ID NO: 166463 - DNA, 15 bp, Homo sapiens
gatggtgatgacatt

SEQ ID NO: 166464 - DNA, 15 bp, Homo sapiens
atggtgatgacattc

SEQ ID NO: 166465 - DNA, 15 bp, Homo sapiens
tggtgatgacattca

SEQ ID NO: 166466 - DNA, 15 bp, Homo sapiens
ggtgatgacattcaa

SEQ ID NO: 166467 - DNA, 15 bp, Homo sapiens
gtgatgacattcaaa

SEQ ID NO: 166468 - DNA, 15 bp, Homo sapiens
tgatgacattcaaat

SEQ ID NO: 166469 - DNA, 15 bp, Homo sapiens
gatgacattcaaata

SEQ ID NO: 166470 - DNA, 15 bp, Homo sapiens
atgacattcaaatag

SEQ ID NO: 166471 - DNA, 15 bp, Homo sapiens
tgacattcaaatagt

SEQ ID NO: 166472 - DNA, 15 bp, Homo sapiens
gacattcaaatagtt

SEQ ID NO: 166473 - DNA, 15 bp, Homo sapiens
acattcaaatagttt

SEQ ID NO: 166474 - DNA, 15 bp, Homo sapiens
cattcaaatagtttt

SEQ ID NO: 166475 - DNA, 15 bp, Homo sapiens
attcaaatagttttt

SEQ ID NO: 166476 - DNA, 15 bp, Homo sapiens
ttcaaatagtttttt

SEQ ID NO: 166477 - DNA, 15 bp, Homo sapiens
tcaaatagtttttta

SEQ ID NO: 166478 - DNA, 15 bp, Homo sapiens
caaatagttttttaa

SEQ ID NO: 166479 - DNA, 15 bp, Homo sapiens
aaatagttttttaaa

SEQ ID NO: 166480 - DNA, 15 bp, Homo sapiens
aatagttttttaaaa

SEQ ID NO: 166481 - DNA, 15 bp, Homo sapiens
atagttttttaaaaa

SEQ ID NO: 166482 - DNA, 15 bp, Homo sapiens
tagttttttaaaaat

SEQ ID NO: 166483 - DNA, 15 bp, Homo sapiens
gttttttaaaaatag

SEQ ID NO: 166484 - DNA, 15 bp, Homo sapiens
ttttttaaaaataga

SEQ ID NO: 166485 - DNA, 15 bp, Homo sapiens
tttttaaaaatagat

SEQ ID NO: 166486 - DNA, 15 bp, Homo sapiens
ttttaaaaatagatt

SEQ ID NO: 166487 - DNA, 15 bp, Homo sapiens
tttaaaaatagattt

SEQ ID NO: 166488 - DNA, 15 bp, Homo sapiens
ttaaaaatagatttt

SEQ ID NO: 166489 - DNA, 15 bp, Homo sapiens
taaaaatagattttc

SEQ ID NO: 166490 - DNA, 15 bp, Homo sapiens
aaaaatagattttct

SEQ ID NO: 166491 - DNA, 15 bp, Homo sapiens
aaaatagattttctc

SEQ ID NO: 166492 - DNA, 15 bp, Homo sapiens
aaatagattttctcc

SEQ ID NO: 166493 - DNA, 15 bp, Homo sapiens
aatagattttctcct

SEQ ID NO: 166494 - DNA, 15 bp, Homo sapiens
atagattttctcctt

SEQ ID NO: 166495 - DNA, 15 bp, Homo sapiens
tagattttctccttt

SEQ ID NO: 166496 - DNA, 15 bp, Homo sapiens
agattttctcctttc

SEQ ID NO: 166497 - DNA, 15 bp, Homo sapiens
gattttctcctttct

SEQ ID NO: 166498 - DNA, 15 bp, Homo sapiens
attttctcctttctg

SEQ ID NO: 166499 - DNA, 15 bp, Homo sapiens
ttttctcctttctgg

SEQ ID NO: 166500 - DNA, 15 bp, Homo sapiens
tttctcctttctggt

SEQ ID NO: 166501 - DNA, 15 bp, Homo sapiens
ttctcctttctggtt

SEQ ID NO: 166502 - DNA, 15 bp, Homo sapiens
tctcctttctggttt

SEQ ID NO: 166503 - DNA, 15 bp, Homo sapiens
ctcctttctggtttc

SEQ ID NO: 166504 - DNA, 15 bp, Homo sapiens
tcctttctggtttcc

SEQ ID NO: 166505 - DNA, 15 bp, Homo sapiens
cctttctggtttccg

SEQ ID NO: 166506 - DNA, 15 bp, Homo sapiens
ctttctggtttccgt

SEQ ID NO: 166507 - DNA, 15 bp, Homo sapiens
tttctggtttccgtt

SEQ ID NO: 166508 - DNA, 15 bp, Homo sapiens
ttctggtttccgttt

SEQ ID NO: 166509 - DNA, 15 bp, Homo sapiens
tctggtttccgtttg

SEQ ID NO: 166510 - DNA, 15 bp, Homo sapiens
ctggtttccgtttgt

SEQ ID NO: 166511 - DNA, 15 bp, Homo sapiens
tggtttccgtttgtg

SEQ ID NO: 166512 - DNA, 15 bp, Homo sapiens
ggtttccgtttgtgt

SEQ ID NO: 166513 - DNA, 15 bp, Homo sapiens
gtttccgtttgtgtt

SEQ ID NO: 166514 - DNA, 15 bp, Homo sapiens
tttccgtttgtgttc

SEQ ID NO: 166515 - DNA, 15 bp, Homo sapiens
ttccgtttgtgttct

SEQ ID NO: 166516 - DNA, 15 bp, Homo sapiens
tccgtttgtgttctt

SEQ ID NO: 166517 - DNA, 15 bp, Homo sapiens
ccgtttgtgttcttt

SEQ ID NO: 166518 - DNA, 15 bp, Homo sapiens
cgtttgtgttctttt

SEQ ID NO: 166519 - DNA, 15 bp, Homo sapiens
gtttgtgttctttta

SEQ ID NO: 166520 - DNA, 15 bp, Homo sapiens
tttgtgttcttttat

SEQ ID NO: 166521 - DNA, 15 bp, Homo sapiens
ttgtgttcttttatg

SEQ ID NO: 166522 - DNA, 15 bp, Homo sapiens
tgtgttcttttatgc

SEQ ID NO: 166523 - DNA, 15 bp, Homo sapiens
gtgttcttttatgcc

SEQ ID NO: 166524 - DNA, 15 bp, Homo sapiens
tgttcttttatgccc

SEQ ID NO: 166525 - DNA, 15 bp, Homo sapiens
gttcttttatgccct

SEQ ID NO: 166526 - DNA, 15 bp, Homo sapiens
ttcttttatgccctt

SEQ ID NO: 166527 - DNA, 15 bp, Homo sapiens
tcttttatgcccttt

SEQ ID NO: 166528 - DNA, 15 bp, Homo sapiens
cttttatgccctttt

SEQ ID NO: 166529 - DNA, 15 bp, Homo sapiens
ttttatgcccttttg

SEQ ID NO: 166530 - DNA, 15 bp, Homo sapiens
tttatgcccttttgc

SEQ ID NO: 166531 - DNA, 15 bp, Homo sapiens
ttatgcccttttgcc

SEQ ID NO: 166532 - DNA, 15 bp, Homo sapiens
tatgcccttttgcca

SEQ ID NO: 166533 - DNA, 15 bp, Homo sapiens
atgcccttttgccag

SEQ ID NO: 166534 - DNA, 15 bp, Homo sapiens
tgcccttttgccaga

SEQ ID NO: 166535 - DNA, 15 bp, Homo sapiens
gcccttttgccagag

SEQ ID NO: 166536 - DNA, 15 bp, Homo sapiens
cccttttgccagagt

SEQ ID NO: 166537 - DNA, 15 bp, Homo sapiens
ccttttgccagagta

SEQ ID NO: 166538 - DNA, 15 bp, Homo sapiens
cttttgccagagtag

SEQ ID NO: 166539 - DNA, 15 bp, Homo sapiens
ttttgccagagtagg

SEQ ID NO: 166540 - DNA, 15 bp, Homo sapiens
tttgccagagtaggt

SEQ ID NO: 166541 - DNA, 15 bp, Homo sapiens
ttgccagagtaggtg

SEQ ID NO: 166542 - DNA, 15 bp, Homo sapiens
tgccagagtaggtgg

SEQ ID NO: 166543 - DNA, 15 bp, Homo sapiens
gccagagtaggtggt

SEQ ID NO: 166544 - DNA, 15 bp, Homo sapiens
ccagagtaggtggtg

SEQ ID NO: 166545 - DNA, 15 bp, Homo sapiens
cagagtaggtggtgc

SEQ ID NO: 166546 - DNA, 15 bp, Homo sapiens
agagtaggtggtgca

SEQ ID NO: 166547 - DNA, 15 bp, Homo sapiens
gagtaggtggtgcaa

SEQ ID NO: 166548 - DNA, 15 bp, Homo sapiens
agtaggtggtgcaat

SEQ ID NO: 166549 - DNA, 15 bp, Homo sapiens
gtaggtggtgcaatt

SEQ ID NO: 166550 - DNA, 15 bp, Homo sapiens
taggtggtgcaattt

SEQ ID NO: 166551 - DNA, 15 bp, Homo sapiens
aggtggtgcaatttg

SEQ ID NO: 166552 - DNA, 15 bp, Homo sapiens
ggtggtgcaatttgg

SEQ ID NO: 166553 - DNA, 15 bp, Homo sapiens
gtggtgcaatttggc

SEQ ID NO: 166554 - DNA, 15 bp, Homo sapiens
tggtgcaatttggct

SEQ ID NO: 166555 - DNA, 15 bp, Homo sapiens
ggtgcaatttggcta

SEQ ID NO: 166556 - DNA, 15 bp, Homo sapiens
gtgcaatttggctag

SEQ ID NO: 166557 - DNA, 15 bp, Homo sapiens
tgcaatttggctagc

SEQ ID NO: 166558 - DNA, 15 bp, Homo sapiens
gcaatttggctagct

SEQ ID NO: 166559 - DNA, 15 bp, Homo sapiens
caatttggctagctg

SEQ ID NO: 166560 - DNA, 15 bp, Homo sapiens
aatttggctagctgg

SEQ ID NO: 166561 - DNA, 15 bp, Homo sapiens
atttggctagctggc

SEQ ID NO: 166562 - DNA, 15 bp, Homo sapiens
tttggctagctggct

SEQ ID NO: 166563 - DNA, 15 bp, Homo sapiens
ttggctagctggctt

SEQ ID NO: 166564 - DNA, 15 bp, Homo sapiens
tggctagctggcttt

SEQ ID NO: 166565 - DNA, 15 bp, Homo sapiens
ggctagctggctttc

SEQ ID NO: 166566 - DNA, 15 bp, Homo sapiens
gctagctggctttca

SEQ ID NO: 166567 - DNA, 15 bp, Homo sapiens
ctagctggctttcat

SEQ ID NO: 166568 - DNA, 15 bp, Homo sapiens
tagctggctttcatt

SEQ ID NO: 166569 - DNA, 15 bp, Homo sapiens
agctggctttcatta

SEQ ID NO: 166570 - DNA, 15 bp, Homo sapiens
gctggctttcattac

SEQ ID NO: 166571 - DNA, 15 bp, Homo sapiens
ctggctttcattact

SEQ ID NO: 166572 - DNA, 15 bp, Homo sapiens
tggctttcattactg

SEQ ID NO: 166573 - DNA, 15 bp, Homo sapiens
ggctttcattactgt

SEQ ID NO: 166574 - DNA, 15 bp, Homo sapiens
gctttcattactgtt

SEQ ID NO: 166575 - DNA, 15 bp, Homo sapiens
ctttcattactgttt

SEQ ID NO: 166576 - DNA, 15 bp, Homo sapiens
tttcattactgtttt

SEQ ID NO: 166577 - DNA, 15 bp, Homo sapiens
ttcattactgttttt

SEQ ID NO: 166578 - DNA, 15 bp, Homo sapiens
tcattactgtttttc

SEQ ID NO: 166579 - DNA, 15 bp, Homo sapiens
cattactgtttttca

SEQ ID NO: 166580 - DNA, 15 bp, Homo sapiens
attactgtttttcac

SEQ ID NO: 166581 - DNA, 15 bp, Homo sapiens
ttactgtttttcaca

SEQ ID NO: 166582 - DNA, 15 bp, Homo sapiens
tactgtttttcacac

SEQ ID NO: 166583 - DNA, 15 bp, Homo sapiens
actgtttttcacaca

SEQ ID NO: 166584 - DNA, 15 bp, Homo sapiens
ctgtttttcacacat

SEQ ID NO: 166585 - DNA, 15 bp, Homo sapiens
tgtttttcacacatt

SEQ ID NO: 166586 - DNA, 15 bp, Homo sapiens
gtttttcacacatta

SEQ ID NO: 166587 - DNA, 15 bp, Homo sapiens
tttttcacacattaa

SEQ ID NO: 166588 - DNA, 15 bp, Homo sapiens
ttttcacacattaac

SEQ ID NO: 166589 - DNA, 15 bp, Homo sapiens
tttcacacattaact

SEQ ID NO: 166590 - DNA, 15 bp, Homo sapiens
ttcacacattaactt

SEQ ID NO: 166591 - DNA, 15 bp, Homo sapiens
tcacacattaacttt

SEQ ID NO: 166592 - DNA, 15 bp, Homo sapiens
cacacattaactttg

SEQ ID NO: 166593 - DNA, 15 bp, Homo sapiens
acacattaactttgg

SEQ ID NO: 166594 - DNA, 15 bp, Homo sapiens
cacattaactttggc

SEQ ID NO: 166595 - DNA, 15 bp, Homo sapiens
acattaactttggcc

SEQ ID NO: 166596 - DNA, 15 bp, Homo sapiens
cattaactttggcct

SEQ ID NO: 166597 - DNA, 15 bp, Homo sapiens
attaactttggcctc

SEQ ID NO: 166598 - DNA, 15 bp, Homo sapiens
ttaactttggcctca

SEQ ID NO: 166599 - DNA, 15 bp, Homo sapiens
taactttggcctcaa

SEQ ID NO: 166600 - DNA, 15 bp, Homo sapiens
aactttggcctcaac

SEQ ID NO: 166601 - DNA, 15 bp, Homo sapiens
actttggcctcaact

SEQ ID NO: 166602 - DNA, 15 bp, Homo sapiens
ctttggcctcaactt

SEQ ID NO: 166603 - DNA, 15 bp, Homo sapiens
tttggcctcaacttg

SEQ ID NO: 166604 - DNA, 15 bp, Homo sapiens
ttggcctcaacttga

SEQ ID NO: 166605 - DNA, 15 bp, Homo sapiens
tggcctcaacttgac

SEQ ID NO: 166606 - DNA, 15 bp, Homo sapiens
ggcctcaacttgaca

SEQ ID NO: 166607 - DNA, 15 bp, Homo sapiens
gcctcaacttgacaa

SEQ ID NO: 166608 - DNA, 15 bp, Homo sapiens
cctcaacttgacaac

SEQ ID NO: 166609 - DNA, 15 bp, Homo sapiens
ctcaacttgacaact

SEQ ID NO: 166610 - DNA, 15 bp, Homo sapiens
tcaacttgacaactc

SEQ ID NO: 166611 - DNA, 15 bp, Homo sapiens
caacttgacaactca

SEQ ID NO: 166612 - DNA, 15 bp, Homo sapiens
aacttgacaactcaa

SEQ ID NO: 166613 - DNA, 15 bp, Homo sapiens
acttgacaactcaaa

SEQ ID NO: 166614 - DNA, 15 bp, Homo sapiens
cttgacaactcaaat

SEQ ID NO: 166615 - DNA, 15 bp, Homo sapiens
ttgacaactcaaata

SEQ ID NO: 166616 - DNA, 15 bp, Homo sapiens
tgacaactcaaataa

SEQ ID NO: 166617 - DNA, 15 bp, Homo sapiens
gacaactcaaataat

SEQ ID NO: 166618 - DNA, 15 bp, Homo sapiens
acaactcaaataata

SEQ ID NO: 166619 - DNA, 15 bp, Homo sapiens
caactcaaataatat

SEQ ID NO: 166620 - DNA, 15 bp, Homo sapiens
aactcaaataatatt

SEQ ID NO: 166621 - DNA, 15 bp, Homo sapiens
actcaaataatattt

SEQ ID NO: 166622 - DNA, 15 bp, Homo sapiens
ctcaaataatattta

SEQ ID NO: 166623 - DNA, 15 bp, Homo sapiens
tcaaataatatttat

SEQ ID NO: 166624 - DNA, 15 bp, Homo sapiens
caaataatatttata

SEQ ID NO: 166625 - DNA, 15 bp, Homo sapiens
aaataatatttataa

SEQ ID NO: 166626 - DNA, 15 bp, Homo sapiens
aataatatttataaa

SEQ ID NO: 166627 - DNA, 15 bp, Homo sapiens
ataatatttataaat

SEQ ID NO: 166628 - DNA, 15 bp, Homo sapiens
agtgtggacacagct

SEQ ID NO: 166629 - DNA, 15 bp, Homo sapiens
gtgtggacacagctt

SEQ ID NO: 166630 - DNA, 15 bp, Homo sapiens
tgtggacacagcttt

SEQ ID NO: 166631 - DNA, 15 bp, Homo sapiens
gtggacacagcttta

SEQ ID NO: 166632 - DNA, 15 bp, Homo sapiens
tggacacagctttaa

SEQ ID NO: 166633 - DNA, 15 bp, Homo sapiens
ggacacagctttaaa

SEQ ID NO: 166634 - DNA, 15 bp, Homo sapiens
gacacagctttaaaa

SEQ ID NO: 166635 - DNA, 15 bp, Homo sapiens
acacagctttaaaat

SEQ ID NO: 166636 - DNA, 15 bp, Homo sapiens
cacagctttaaaatc

SEQ ID NO: 166637 - DNA, 15 bp, Homo sapiens
acagctttaaaatcc

SEQ ID NO: 166638 - DNA, 15 bp, Homo sapiens
cagctttaaaatccc

SEQ ID NO: 166639 - DNA, 15 bp, Homo sapiens
agctttaaaatcccc

SEQ ID NO: 166640 - DNA, 15 bp, Homo sapiens
gctttaaaatcccca

SEQ ID NO: 166641 - DNA, 15 bp, Homo sapiens
ctttaaaatccccaa

SEQ ID NO: 166642 - DNA, 15 bp, Homo sapiens
tttaaaatccccaag

SEQ ID NO: 166643 - DNA, 15 bp, Homo sapiens
ttaaaatccccaagg

SEQ ID NO: 166644 - DNA, 15 bp, Homo sapiens
taaaatccccaaggt

SEQ ID NO: 166645 - DNA, 15 bp, Homo sapiens
aaaatccccaaggta

SEQ ID NO: 166646 - DNA, 15 bp, Homo sapiens
aaatccccaaggtag

SEQ ID NO: 166647 - DNA, 15 bp, Homo sapiens
aatccccaaggtagc

SEQ ID NO: 166648 - DNA, 15 bp, Homo sapiens
atccccaaggtagca

SEQ ID NO: 166649 - DNA, 15 bp, Homo sapiens
tccccaaggtagcaa

SEQ ID NO: 166650 - DNA, 15 bp, Homo sapiens
ccccaaggtagcaac

SEQ ID NO: 166651 - DNA, 15 bp, Homo sapiens
cccaaggtagcaact

SEQ ID NO: 166652 - DNA, 15 bp, Homo sapiens
ccaaggtagcaacta

SEQ ID NO: 166653 - DNA, 15 bp, Homo sapiens
caaggtagcaactag

SEQ ID NO: 166654 - DNA, 15 bp, Homo sapiens
aaggtagcaactagg

SEQ ID NO: 166655 - DNA, 15 bp, Homo sapiens
aggtagcaactaggt

SEQ ID NO: 166656 - DNA, 15 bp, Homo sapiens
ggtagcaactaggtc

SEQ ID NO: 166657 - DNA, 15 bp, Homo sapiens
gtagcaactaggtca

SEQ ID NO: 166658 - DNA, 15 bp, Homo sapiens
tagcaactaggtcat

SEQ ID NO: 166659 - DNA, 15 bp, Homo sapiens
agcaactaggtcata

SEQ ID NO: 166660 - DNA, 15 bp, Homo sapiens
gcaactaggtcatag

SEQ ID NO: 166661 - DNA, 15 bp, Homo sapiens
caactaggtcatagt

SEQ ID NO: 166662 - DNA, 15 bp, Homo sapiens
aactaggtcatagtt

SEQ ID NO: 166663 - DNA, 15 bp, Homo sapiens
actaggtcatagttc

SEQ ID NO: 166664 - DNA, 15 bp, Homo sapiens
ctaggtcatagttcc

SEQ ID NO: 166665 - DNA, 15 bp, Homo sapiens
taggtcatagttcct

SEQ ID NO: 166666 - DNA, 15 bp, Homo sapiens
aggtcatagttcctt

SEQ ID NO: 166667 - DNA, 15 bp, Homo sapiens
ggtcatagttcctta

SEQ ID NO: 166668 - DNA, 15 bp, Homo sapiens
gtcatagttccttac

SEQ ID NO: 166669 - DNA, 15 bp, Homo sapiens
tcatagttccttaca

SEQ ID NO: 166670 - DNA, 15 bp, Homo sapiens
catagttccttacac

SEQ ID NO: 166671 - DNA, 15 bp, Homo sapiens
atagttccttacaca

SEQ ID NO: 166672 - DNA, 15 bp, Homo sapiens
tagttccttacacac

SEQ ID NO: 166673 - DNA, 15 bp, Homo sapiens
agttccttacacacg

SEQ ID NO: 166674 - DNA, 15 bp, Homo sapiens
gttccttacacacgg

SEQ ID NO: 166675 - DNA, 15 bp, Homo sapiens
ttccttacacacgga

SEQ ID NO: 166676 - DNA, 15 bp, Homo sapiens
tccttacacacggat

SEQ ID NO: 166677 - DNA, 15 bp, Homo sapiens
ccttacacacggata

SEQ ID NO: 166678 - DNA, 15 bp, Homo sapiens
cttacacacggatag

SEQ ID NO: 166679 - DNA, 15 bp, Homo sapiens
ttacacacggataga

SEQ ID NO: 166680 - DNA, 15 bp, Homo sapiens
tacacacggatagat

SEQ ID NO: 166681 - DNA, 15 bp, Homo sapiens
acacacggatagatg

SEQ ID NO: 166682 - DNA, 15 bp, Homo sapiens
cacacggatagatga

SEQ ID NO: 166683 - DNA, 15 bp, Homo sapiens
acacggatagatgaa

SEQ ID NO: 166684 - DNA, 15 bp, Homo sapiens
cacggatagatgaaa

SEQ ID NO: 166685 - DNA, 15 bp, Homo sapiens
acggatagatgaaaa

SEQ ID NO: 166686 - DNA, 15 bp, Homo sapiens
cggatagatgaaaaa

SEQ ID NO: 166687 - DNA, 15 bp, Homo sapiens
ggatagatgaaaaac

SEQ ID NO: 166688 - DNA, 15 bp, Homo sapiens
gatagatgaaaaaca

SEQ ID NO: 166689 - DNA, 15 bp, Homo sapiens
atagatgaaaaacag

SEQ ID NO: 166690 - DNA, 15 bp, Homo sapiens
tagatgaaaaacaga

SEQ ID NO: 166691 - DNA, 15 bp, Homo sapiens
agatgaaaaacagat

SEQ ID NO: 166692 - DNA, 15 bp, Homo sapiens
gatgaaaaacagatc

SEQ ID NO: 166693 - DNA, 15 bp, Homo sapiens
atgaaaaacagatca

SEQ ID NO: 166694 - DNA, 15 bp, Homo sapiens
tgaaaaacagatcag

SEQ ID NO: 166695 - DNA, 15 bp, Homo sapiens
gaaaaacagatcaga

SEQ ID NO: 166696 - DNA, 15 bp, Homo sapiens
aaaaacagatcagac

SEQ ID NO: 166697 - DNA, 15 bp, Homo sapiens
aaaacagatcagact

SEQ ID NO: 166698 - DNA, 15 bp, Homo sapiens
aaacagatcagactg

SEQ ID NO: 166699 - DNA, 15 bp, Homo sapiens
aacagatcagactgg

SEQ ID NO: 166700 - DNA, 15 bp, Homo sapiens
acagatcagactggg

SEQ ID NO: 166701 - DNA, 15 bp, Homo sapiens
cagatcagactggga

SEQ ID NO: 166702 - DNA, 15 bp, Homo sapiens
agatcagactgggaa

SEQ ID NO: 166703 - DNA, 15 bp, Homo sapiens
gatcagactgggaag

SEQ ID NO: 166704 - DNA, 15 bp, Homo sapiens
atcagactgggaagt

SEQ ID NO: 166705 - DNA, 15 bp, Homo sapiens
tcagactgggaagtg

SEQ ID NO: 166706 - DNA, 15 bp, Homo sapiens
cagactgggaagtgg

SEQ ID NO: 166707 - DNA, 15 bp, Homo sapiens
agactgggaagtggc

SEQ ID NO: 166708 - DNA, 15 bp, Homo sapiens
gactgggaagtggcc

SEQ ID NO: 166709 - DNA, 15 bp, Homo sapiens
actgggaagtggccc

SEQ ID NO: 166710 - DNA, 15 bp, Homo sapiens
ctgggaagtggccct

SEQ ID NO: 166711 - DNA, 15 bp, Homo sapiens
tgggaagtggccctt

SEQ ID NO: 166712 - DNA, 15 bp, Homo sapiens
gggaagtggcccttg

SEQ ID NO: 166713 - DNA, 15 bp, Homo sapiens
ggaagtggcccttga

SEQ ID NO: 166714 - DNA, 15 bp, Homo sapiens
gaagtggcccttgac

SEQ ID NO: 166715 - DNA, 15 bp, Homo sapiens
aagtggcccttgacc

SEQ ID NO: 166716 - DNA, 15 bp, Homo sapiens
agtggcccttgacct

SEQ ID NO: 166717 - DNA, 15 bp, Homo sapiens
gtggcccttgacctt

SEQ ID NO: 166718 - DNA, 15 bp, Homo sapiens
tggcccttgaccttt

SEQ ID NO: 166719 - DNA, 15 bp, Homo sapiens
ggcccttgacctttt

SEQ ID NO: 166720 - DNA, 15 bp, Homo sapiens
gcccttgaccttttt

SEQ ID NO: 166721 - DNA, 15 bp, Homo sapiens
cccttgacctttttt

SEQ ID NO: 166722 - DNA, 15 bp, Homo sapiens
ccttgaccttttttc

SEQ ID NO: 166723 - DNA, 15 bp, Homo sapiens
cttgaccttttttct

SEQ ID NO: 166724 - DNA, 15 bp, Homo sapiens
ttgaccttttttctt

SEQ ID NO: 166725 - DNA, 15 bp, Homo sapiens
tgaccttttttcttc

SEQ ID NO: 166726 - DNA, 15 bp, Homo sapiens
gaccttttttcttct

SEQ ID NO: 166727 - DNA, 15 bp, Homo sapiens
accttttttcttctg

SEQ ID NO: 166728 - DNA, 15 bp, Homo sapiens
ccttttttcttctgt

SEQ ID NO: 166729 - DNA, 15 bp, Homo sapiens
cttttttcttctgta

SEQ ID NO: 166730 - DNA, 15 bp, Homo sapiens
ttttttcttctgtag

SEQ ID NO: 166731 - DNA, 15 bp, Homo sapiens
tttttcttctgtaga

SEQ ID NO: 166732 - DNA, 15 bp, Homo sapiens
tttcttctgtagata

SEQ ID NO: 166733 - DNA, 15 bp, Homo sapiens
ttcttctgtagataa

SEQ ID NO: 166734 - DNA, 15 bp, Homo sapiens
tcttctgtagataag

SEQ ID NO: 166735 - DNA, 15 bp, Homo sapiens
cttctgtagataaga

SEQ ID NO: 166736 - DNA, 15 bp, Homo sapiens
ttctgtagataagag

SEQ ID NO: 166737 - DNA, 15 bp, Homo sapiens
tctgtagataagagc

SEQ ID NO: 166738 - DNA, 15 bp, Homo sapiens
ctgtagataagagca

SEQ ID NO: 166739 - DNA, 15 bp, Homo sapiens
tgtagataagagcat

SEQ ID NO: 166740 - DNA, 15 bp, Homo sapiens
gtagataagagcatt

SEQ ID NO: 166741 - DNA, 15 bp, Homo sapiens
tagataagagcattg

SEQ ID NO: 166742 - DNA, 15 bp, Homo sapiens
agataagagcattga

SEQ ID NO: 166743 - DNA, 15 bp, Homo sapiens
gataagagcattgat

SEQ ID NO: 166744 - DNA, 15 bp, Homo sapiens
ataagagcattgatg

SEQ ID NO: 166745 - DNA, 15 bp, Homo sapiens
taagagcattgatgt

SEQ ID NO: 166746 - DNA, 15 bp, Homo sapiens
aagagcattgatgtt

SEQ ID NO: 166747 - DNA, 15 bp, Homo sapiens
agagcattgatgtta

SEQ ID NO: 166748 - DNA, 15 bp, Homo sapiens
gagcattgatgttat

SEQ ID NO: 166749 - DNA, 15 bp, Homo sapiens
agcattgatgttatt

SEQ ID NO: 166750 - DNA, 15 bp, Homo sapiens
gcattgatgttatta

SEQ ID NO: 166751 - DNA, 15 bp, Homo sapiens
cattgatgttattac

SEQ ID NO: 166752 - DNA, 15 bp, Homo sapiens
attgatgttattacg

SEQ ID NO: 166753 - DNA, 15 bp, Homo sapiens
ttgatgttattacgg

SEQ ID NO: 166754 - DNA, 15 bp, Homo sapiens
tgatgttattacggg

SEQ ID NO: 166755 - DNA, 15 bp, Homo sapiens
gatgttattacggga

SEQ ID NO: 166756 - DNA, 15 bp, Homo sapiens
atgttattacgggaa

SEQ ID NO: 166757 - DNA, 15 bp, Homo sapiens
tgttattacgggaag

SEQ ID NO: 166758 - DNA, 15 bp, Homo sapiens
gttattacgggaaga

SEQ ID NO: 166759 - DNA, 15 bp, Homo sapiens
ttattacgggaagaa

SEQ ID NO: 166760 - DNA, 15 bp, Homo sapiens
tattacgggaagaag

SEQ ID NO: 166761 - DNA, 15 bp, Homo sapiens
attacgggaagaagc

SEQ ID NO: 166762 - DNA, 15 bp, Homo sapiens
ttacgggaagaagcc

SEQ ID NO: 166763 - DNA, 15 bp, Homo sapiens
tacgggaagaagcct

SEQ ID NO: 166764 - DNA, 15 bp, Homo sapiens
acgggaagaagcctt

SEQ ID NO: 166765 - DNA, 15 bp, Homo sapiens
cgggaagaagccttt

SEQ ID NO: 166766 - DNA, 15 bp, Homo sapiens
gggaagaagcctttg

SEQ ID NO: 166767 - DNA, 15 bp, Homo sapiens
ggaagaagcctttga

SEQ ID NO: 166768 - DNA, 15 bp, Homo sapiens
gaagaagcctttgag

SEQ ID NO: 166769 - DNA, 15 bp, Homo sapiens
aagaagcctttgagg

SEQ ID NO: 166770 - DNA, 15 bp, Homo sapiens
agaagcctttgaggc

SEQ ID NO: 166771 - DNA, 15 bp, Homo sapiens
gaagcctttgaggct

SEQ ID NO: 166772 - DNA, 15 bp, Homo sapiens
aagcctttgaggctt

SEQ ID NO: 166773 - DNA, 15 bp, Homo sapiens
agcctttgaggcttt

SEQ ID NO: 166774 - DNA, 15 bp, Homo sapiens
gcctttgaggctttt

SEQ ID NO: 166775 - DNA, 15 bp, Homo sapiens
cctttgaggctttta

SEQ ID NO: 166776 - DNA, 15 bp, Homo sapiens
ctttgaggcttttat

SEQ ID NO: 166777 - DNA, 15 bp, Homo sapiens
tttgaggcttttatg

SEQ ID NO: 166778 - DNA, 15 bp, Homo sapiens
ttgaggcttttatgt

SEQ ID NO: 166779 - DNA, 15 bp, Homo sapiens
tgaggcttttatgta

SEQ ID NO: 166780 - DNA, 15 bp, Homo sapiens
gaggcttttatgtat

SEQ ID NO: 166781 - DNA, 15 bp, Homo sapiens
aggcttttatgtatt

SEQ ID NO: 166782 - DNA, 15 bp, Homo sapiens
ggcttttatgtattc

SEQ ID NO: 166783 - DNA, 15 bp, Homo sapiens
gcttttatgtattcc

SEQ ID NO: 166784 - DNA, 15 bp, Homo sapiens
cttttatgtattcca

SEQ ID NO: 166785 - DNA, 15 bp, Homo sapiens
ttttatgtattccac

SEQ ID NO: 166786 - DNA, 15 bp, Homo sapiens
tttatgtattccacc

SEQ ID NO: 166787 - DNA, 15 bp, Homo sapiens
ttatgtattccacct

SEQ ID NO: 166788 - DNA, 15 bp, Homo sapiens
tatgtattccacctc

SEQ ID NO: 166789 - DNA, 15 bp, Homo sapiens
atgtattccacctcg

SEQ ID NO: 166790 - DNA, 15 bp, Homo sapiens
tgtattccacctcgg

SEQ ID NO: 166791 - DNA, 15 bp, Homo sapiens
gtattccacctcggt

SEQ ID NO: 166792 - DNA, 15 bp, Homo sapiens
tattccacctcggtc

SEQ ID NO: 166793 - DNA, 15 bp, Homo sapiens
attccacctcggtct

SEQ ID NO: 166794 - DNA, 15 bp, Homo sapiens
ttccacctcggtctg

SEQ ID NO: 166795 - DNA, 15 bp, Homo sapiens
tccacctcggtctgg

SEQ ID NO: 166796 - DNA, 15 bp, Homo sapiens
ccacctcggtctgga

SEQ ID NO: 166797 - DNA, 15 bp, Homo sapiens
cacctcggtctggaa

SEQ ID NO: 166798 - DNA, 15 bp, Homo sapiens
acctcggtctggaat

SEQ ID NO: 166799 - DNA, 15 bp, Homo sapiens
cctcggtctggaatt

SEQ ID NO: 166800 - DNA, 15 bp, Homo sapiens
ctcggtctggaattt

SEQ ID NO: 166801 - DNA, 15 bp, Homo sapiens
tcggtctggaatttg

SEQ ID NO: 166802 - DNA, 15 bp, Homo sapiens
cggtctggaatttgt

SEQ ID NO: 166803 - DNA, 15 bp, Homo sapiens
ggtctggaatttgtt

SEQ ID NO: 166804 - DNA, 15 bp, Homo sapiens
gtctggaatttgttt

SEQ ID NO: 166805 - DNA, 15 bp, Homo sapiens
tctggaatttgtttc

SEQ ID NO: 166806 - DNA, 15 bp, Homo sapiens
ctggaatttgtttct

SEQ ID NO: 166807 - DNA, 15 bp, Homo sapiens
tggaatttgtttctg

SEQ ID NO: 166808 - DNA, 15 bp, Homo sapiens
ggaatttgtttctgt

SEQ ID NO: 166809 - DNA, 15 bp, Homo sapiens
gaatttgtttctgta

SEQ ID NO: 166810 - DNA, 15 bp, Homo sapiens
aatttgtttctgtaa

SEQ ID NO: 166811 - DNA, 15 bp, Homo sapiens
atttgtttctgtaag

SEQ ID NO: 166812 - DNA, 15 bp, Homo sapiens
tttgtttctgtaagg

SEQ ID NO: 166813 - DNA, 15 bp, Homo sapiens
ttgtttctgtaaggc

SEQ ID NO: 166814 - DNA, 15 bp, Homo sapiens
tgtttctgtaaggct

SEQ ID NO: 166815 - DNA, 15 bp, Homo sapiens
gtttctgtaaggcta

SEQ ID NO: 166816 - DNA, 15 bp, Homo sapiens
tttctgtaaggctaa

SEQ ID NO: 166817 - DNA, 15 bp, Homo sapiens
ttctgtaaggctaac

SEQ ID NO: 166818 - DNA, 15 bp, Homo sapiens
tctgtaaggctaaca

SEQ ID NO: 166819 - DNA, 15 bp, Homo sapiens
ctgtaaggctaacag

SEQ ID NO: 166820 - DNA, 15 bp, Homo sapiens
tgtaaggctaacagt

SEQ ID NO: 166821 - DNA, 15 bp, Homo sapiens
gtaaggctaacagtt

SEQ ID NO: 166822 - DNA, 15 bp, Homo sapiens
taaggctaacagttg

SEQ ID NO: 166823 - DNA, 15 bp, Homo sapiens
aaggctaacagttgc

SEQ ID NO: 166824 - DNA, 15 bp, Homo sapiens
aggctaacagttgca

SEQ ID NO: 166825 - DNA, 15 bp, Homo sapiens
ggctaacagttgcaa

SEQ ID NO: 166826 - DNA, 15 bp, Homo sapiens
gctaacagttgcaat

SEQ ID NO: 166827 - DNA, 15 bp, Homo sapiens
ctaacagttgcaata

SEQ ID NO: 166828 - DNA, 15 bp, Homo sapiens
taacagttgcaatat

SEQ ID NO: 166829 - DNA, 15 bp, Homo sapiens
aacagttgcaatata

SEQ ID NO: 166830 - DNA, 15 bp, Homo sapiens
acagttgcaatatac

SEQ ID NO: 166831 - DNA, 15 bp, Homo sapiens
cagttgcaatatact

SEQ ID NO: 166832 - DNA, 15 bp, Homo sapiens
agttgcaatatacta

SEQ ID NO: 166833 - DNA, 15 bp, Homo sapiens
gttgcaatatactag

SEQ ID NO: 166834 - DNA, 15 bp, Homo sapiens
ttgcaatatactagg

SEQ ID NO: 166835 - DNA, 15 bp, Homo sapiens
tgcaatatactaggg

SEQ ID NO: 166836 - DNA, 15 bp, Homo sapiens
gcaatatactagggt

SEQ ID NO: 166837 - DNA, 15 bp, Homo sapiens
caatatactagggta

SEQ ID NO: 166838 - DNA, 15 bp, Homo sapiens
aatatactagggtaa

SEQ ID NO: 166839 - DNA, 15 bp, Homo sapiens
atatactagggtaat

SEQ ID NO: 166840 - DNA, 15 bp, Homo sapiens
tatactagggtaatc

SEQ ID NO: 166841 - DNA, 15 bp, Homo sapiens
atactagggtaatct

SEQ ID NO: 166842 - DNA, 15 bp, Homo sapiens
tactagggtaatctg

SEQ ID NO: 166843 - DNA, 15 bp, Homo sapiens
actagggtaatctga

SEQ ID NO: 166844 - DNA, 15 bp, Homo sapiens
ctagggtaatctgag

SEQ ID NO: 166845 - DNA, 15 bp, Homo sapiens
tagggtaatctgagt

SEQ ID NO: 166846 - DNA, 15 bp, Homo sapiens
agggtaatctgagtg

SEQ ID NO: 166847 - DNA, 15 bp, Homo sapiens
gggtaatctgagtga

SEQ ID NO: 166848 - DNA, 15 bp, Homo sapiens
ggtaatctgagtgag

SEQ ID NO: 166849 - DNA, 15 bp, Homo sapiens
gtaatctgagtgagc

SEQ ID NO: 166850 - DNA, 15 bp, Homo sapiens
taatctgagtgagct

SEQ ID NO: 166851 - DNA, 15 bp, Homo sapiens
aatctgagtgagctg

SEQ ID NO: 166852 - DNA, 15 bp, Homo sapiens
atctgagtgagctgg

SEQ ID NO: 166853 - DNA, 15 bp, Homo sapiens
tctgagtgagctgga

SEQ ID NO: 166854 - DNA, 15 bp, Homo sapiens
ctgagtgagctggaa

SEQ ID NO: 166855 - DNA, 15 bp, Homo sapiens
tgagtgagctggaat

SEQ ID NO: 166856 - DNA, 15 bp, Homo sapiens
gagtgagctggaatt

SEQ ID NO: 166857 - DNA, 15 bp, Homo sapiens
agtgagctggaatta

SEQ ID NO: 166858 - DNA, 15 bp, Homo sapiens
gtgagctggaattaa

SEQ ID NO: 166859 - DNA, 15 bp, Homo sapiens
tgagctggaattaaa

SEQ ID NO: 166860 - DNA, 15 bp, Homo sapiens
gagctggaattaaaa

SEQ ID NO: 166861 - DNA, 15 bp, Homo sapiens
agctggaattaaaaa

SEQ ID NO: 166862 - DNA, 15 bp, Homo sapiens
gctggaattaaaaaa

SEQ ID NO: 166863 - DNA, 15 bp, Homo sapiens
ctggaattaaaaaaa

SEQ ID NO: 166864 - DNA, 15 bp, Homo sapiens
tggaattaaaaaaaa

SEQ ID NO: 166865 - DNA, 15 bp, Homo sapiens
ggaattaaaaaaaaa

SEQ ID NO: 166866 - DNA, 15 bp, Homo sapiens
gaattaaaaaaaaaa

SEQ ID NO: 166867 - DNA, 15 bp, Homo sapiens
attaaaaaaaaaaag

SEQ ID NO: 166868 - DNA, 15 bp, Homo sapiens
ttaaaaaaaaaaagg

SEQ ID NO: 166869 - DNA, 15 bp, Homo sapiens
taaaaaaaaaaagga

SEQ ID NO: 166870 - DNA, 15 bp, Homo sapiens
aaaaaaaaaaaggaa

SEQ ID NO: 166871 - DNA, 15 bp, Homo sapiens
aaaaaaaaaaggaat

SEQ ID NO: 166872 - DNA, 15 bp, Homo sapiens
aaaaaaaaaggaatt

SEQ ID NO: 166873 - DNA, 15 bp, Homo sapiens
aaaaaaaaggaattt

SEQ ID NO: 166874 - DNA, 15 bp, Homo sapiens
aaaaaaaggaatttc

SEQ ID NO: 166875 - DNA, 15 bp, Homo sapiens
aaaaaaggaatttca

SEQ ID NO: 166876 - DNA, 15 bp, Homo sapiens
aaaaaggaatttcac

SEQ ID NO: 166877 - DNA, 15 bp, Homo sapiens
aaaaggaatttcacc

SEQ ID NO: 166878 - DNA, 15 bp, Homo sapiens
aaaggaatttcaccc

SEQ ID NO: 166879 - DNA, 15 bp, Homo sapiens
aaggaatttcacccc

SEQ ID NO: 166880 - DNA, 15 bp, Homo sapiens
aggaatttcacccca

SEQ ID NO: 166881 - DNA, 15 bp, Homo sapiens
ggaatttcaccccaa

SEQ ID NO: 166882 - DNA, 15 bp, Homo sapiens
gaatttcaccccaat

SEQ ID NO: 166883 - DNA, 15 bp, Homo sapiens
aatttcaccccaatc

SEQ ID NO: 166884 - DNA, 15 bp, Homo sapiens
atttcaccccaatct

SEQ ID NO: 166885 - DNA, 15 bp, Homo sapiens
tttcaccccaatctt

SEQ ID NO: 166886 - DNA, 15 bp, Homo sapiens
ttcaccccaatctta

SEQ ID NO: 166887 - DNA, 15 bp, Homo sapiens
tcaccccaatcttat

SEQ ID NO: 166888 - DNA, 15 bp, Homo sapiens
caccccaatcttata

SEQ ID NO: 166889 - DNA, 15 bp, Homo sapiens
accccaatcttatac

SEQ ID NO: 166890 - DNA, 15 bp, Homo sapiens
ccccaatcttatact

SEQ ID NO: 166891 - DNA, 15 bp, Homo sapiens
cccaatcttatactg

SEQ ID NO: 166892 - DNA, 15 bp, Homo sapiens
ccaatcttatactga

SEQ ID NO: 166893 - DNA, 15 bp, Homo sapiens
caatcttatactgac

SEQ ID NO: 166894 - DNA, 15 bp, Homo sapiens
aatcttatactgact

SEQ ID NO: 166895 - DNA, 15 bp, Homo sapiens
atcttatactgactt

SEQ ID NO: 166896 - DNA, 15 bp, Homo sapiens
tcttatactgacttc

SEQ ID NO: 166897 - DNA, 15 bp, Homo sapiens
cttatactgacttca

SEQ ID NO: 166898 - DNA, 15 bp, Homo sapiens
ttatactgacttcaa

SEQ ID NO: 166899 - DNA, 15 bp, Homo sapiens
tatactgacttcaat

SEQ ID NO: 166900 - DNA, 15 bp, Homo sapiens
atactgacttcaata

SEQ ID NO: 166901 - DNA, 15 bp, Homo sapiens
tactgacttcaatag

SEQ ID NO: 166902 - DNA, 15 bp, Homo sapiens
actgacttcaataga

SEQ ID NO: 166903 - DNA, 15 bp, Homo sapiens
ctgacttcaatagag

SEQ ID NO: 166904 - DNA, 15 bp, Homo sapiens
tgacttcaatagagg

SEQ ID NO: 166905 - DNA, 15 bp, Homo sapiens
gacttcaatagaggt

SEQ ID NO: 166906 - DNA, 15 bp, Homo sapiens
acttcaatagaggtt

SEQ ID NO: 166907 - DNA, 15 bp, Homo sapiens
cttcaatagaggttt

SEQ ID NO: 166908 - DNA, 15 bp, Homo sapiens
ttcaatagaggtttc

SEQ ID NO: 166909 - DNA, 15 bp, Homo sapiens
tcaatagaggtttca

SEQ ID NO: 166910 - DNA, 15 bp, Homo sapiens
caatagaggtttcag

SEQ ID NO: 166911 - DNA, 15 bp, Homo sapiens
aatagaggtttcaga

SEQ ID NO: 166912 - DNA, 15 bp, Homo sapiens
atagaggtttcagac

SEQ ID NO: 166913 - DNA, 15 bp, Homo sapiens
tagaggtttcagaca

SEQ ID NO: 166914 - DNA, 15 bp, Homo sapiens
agaggtttcagacaa

SEQ ID NO: 166915 - DNA, 15 bp, Homo sapiens
gaggtttcagacaaa

SEQ ID NO: 166916 - DNA, 15 bp, Homo sapiens
aggtttcagacaaaa

SEQ ID NO: 166917 - DNA, 15 bp, Homo sapiens
ggtttcagacaaaaa

SEQ ID NO: 166918 - DNA, 15 bp, Homo sapiens
gtttcagacaaaaag

SEQ ID NO: 166919 - DNA, 15 bp, Homo sapiens
tttcagacaaaaagt

SEQ ID NO: 166920 - DNA, 15 bp, Homo sapiens
ttcagacaaaaagtt

SEQ ID NO: 166921 - DNA, 15 bp, Homo sapiens
tcagacaaaaagttg

SEQ ID NO: 166922 - DNA, 15 bp, Homo sapiens
cagacaaaaagttgt

SEQ ID NO: 166923 - DNA, 15 bp, Homo sapiens
agacaaaaagttgtt

SEQ ID NO: 166924 - DNA, 15 bp, Homo sapiens
gacaaaaagttgttt

SEQ ID NO: 166925 - DNA, 15 bp, Homo sapiens
acaaaaagttgtttt

SEQ ID NO: 166926 - DNA, 15 bp, Homo sapiens
caaaaagttgttttg

SEQ ID NO: 166927 - DNA, 15 bp, Homo sapiens
aaaaagttgttttgt

SEQ ID NO: 166928 - DNA, 15 bp, Homo sapiens
aaaagttgttttgta

SEQ ID NO: 166929 - DNA, 15 bp, Homo sapiens
aaagttgttttgtat

SEQ ID NO: 166930 - DNA, 15 bp, Homo sapiens
aagttgttttgtata

SEQ ID NO: 166931 - DNA, 15 bp, Homo sapiens
agttgttttgtatat

SEQ ID NO: 166932 - DNA, 15 bp, Homo sapiens
gttgttttgtatata

SEQ ID NO: 166933 - DNA, 15 bp, Homo sapiens
ttgttttgtatatac

SEQ ID NO: 166934 - DNA, 15 bp, Homo sapiens
tgttttgtatatact

SEQ ID NO: 166935 - DNA, 15 bp, Homo sapiens
gttttgtatatactt

SEQ ID NO: 166936 - DNA, 15 bp, Homo sapiens
ttttgtatatactta

SEQ ID NO: 166937 - DNA, 15 bp, Homo sapiens
tttgtatatacttat

SEQ ID NO: 166938 - DNA, 15 bp, Homo sapiens
ttgtatatacttatc

SEQ ID NO: 166939 - DNA, 15 bp, Homo sapiens
tgtatatacttatca

SEQ ID NO: 166940 - DNA, 15 bp, Homo sapiens
gtatatacttatcag

SEQ ID NO: 166941 - DNA, 15 bp, Homo sapiens
tatatacttatcagt

SEQ ID NO: 166942 - DNA, 15 bp, Homo sapiens
atatacttatcagtc

SEQ ID NO: 166943 - DNA, 15 bp, Homo sapiens
tatacttatcagtca

SEQ ID NO: 166944 - DNA, 15 bp, Homo sapiens
atacttatcagtcat

SEQ ID NO: 166945 - DNA, 15 bp, Homo sapiens
tacttatcagtcatg

SEQ ID NO: 166946 - DNA, 15 bp, Homo sapiens
acttatcagtcatga

SEQ ID NO: 166947 - DNA, 15 bp, Homo sapiens
cttatcagtcatgaa

SEQ ID NO: 166948 - DNA, 15 bp, Homo sapiens
ttatcagtcatgaaa

SEQ ID NO: 166949 - DNA, 15 bp, Homo sapiens
tatcagtcatgaaaa

SEQ ID NO: 166950 - DNA, 15 bp, Homo sapiens
atcagtcatgaaaag

SEQ ID NO: 166951 - DNA, 15 bp, Homo sapiens
tcagtcatgaaaaga

SEQ ID NO: 166952 - DNA, 15 bp, Homo sapiens
cagtcatgaaaagat

SEQ ID NO: 166953 - DNA, 15 bp, Homo sapiens
agtcatgaaaagata

SEQ ID NO: 166954 - DNA, 15 bp, Homo sapiens
gtcatgaaaagataa

SEQ ID NO: 166955 - DNA, 15 bp, Homo sapiens
tcatgaaaagataat

SEQ ID NO: 166956 - DNA, 15 bp, Homo sapiens
catgaaaagataatt

SEQ ID NO: 166957 - DNA, 15 bp, Homo sapiens
atgaaaagataatta

SEQ ID NO: 166958 - DNA, 15 bp, Homo sapiens
tgaaaagataattac

SEQ ID NO: 166959 - DNA, 15 bp, Homo sapiens
gaaaagataattaca

SEQ ID NO: 166960 - DNA, 15 bp, Homo sapiens
aaaagataattacaa

SEQ ID NO: 166961 - DNA, 15 bp, Homo sapiens
aaagataattacaac

SEQ ID NO: 166962 - DNA, 15 bp, Homo sapiens
aagataattacaact

SEQ ID NO: 166963 - DNA, 15 bp, Homo sapiens
agataattacaacta

SEQ ID NO: 166964 - DNA, 15 bp, Homo sapiens
gataattacaactaa

SEQ ID NO: 166965 - DNA, 15 bp, Homo sapiens
ataattacaactaaa

SEQ ID NO: 166966 - DNA, 15 bp, Homo sapiens
taattacaactaaat

SEQ ID NO: 166967 - DNA, 15 bp, Homo sapiens
aattacaactaaatg

SEQ ID NO: 166968 - DNA, 15 bp, Homo sapiens
attacaactaaatgg

SEQ ID NO: 166969 - DNA, 15 bp, Homo sapiens
ttacaactaaatggc

SEQ ID NO: 166970 - DNA, 15 bp, Homo sapiens
tacaactaaatggcc

SEQ ID NO: 166971 - DNA, 15 bp, Homo sapiens
acaactaaatggcct

SEQ ID NO: 166972 - DNA, 15 bp, Homo sapiens
caactaaatggcctt

SEQ ID NO: 166973 - DNA, 15 bp, Homo sapiens
aactaaatggccttt

SEQ ID NO: 166974 - DNA, 15 bp, Homo sapiens
actaaatggcctttt

SEQ ID NO: 166975 - DNA, 15 bp, Homo sapiens
ctaaatggccttttt

SEQ ID NO: 166976 - DNA, 15 bp, Homo sapiens
taaatggcctttttc

SEQ ID NO: 166977 - DNA, 15 bp, Homo sapiens
aaatggcctttttcc

SEQ ID NO: 166978 - DNA, 15 bp, Homo sapiens
aatggcctttttcct

SEQ ID NO: 166979 - DNA, 15 bp, Homo sapiens
atggcctttttcctt

SEQ ID NO: 166980 - DNA, 15 bp, Homo sapiens
tggcctttttccttc

SEQ ID NO: 166981 - DNA, 15 bp, Homo sapiens
ggcctttttccttcc

SEQ ID NO: 166982 - DNA, 15 bp, Homo sapiens
gcctttttccttccc

SEQ ID NO: 166983 - DNA, 15 bp, Homo sapiens
cctttttccttccct

SEQ ID NO: 166984 - DNA, 15 bp, Homo sapiens
ctttttccttcccta

SEQ ID NO: 166985 - DNA, 15 bp, Homo sapiens
tttttccttccctat

SEQ ID NO: 166986 - DNA, 15 bp, Homo sapiens
ttttccttccctatt

SEQ ID NO: 166987 - DNA, 15 bp, Homo sapiens
tttccttccctattt

SEQ ID NO: 166988 - DNA, 15 bp, Homo sapiens
ttccttccctattta

SEQ ID NO: 166989 - DNA, 15 bp, Homo sapiens
tccttccctatttat

SEQ ID NO: 166990 - DNA, 15 bp, Homo sapiens
ccttccctatttatt

SEQ ID NO: 166991 - DNA, 15 bp, Homo sapiens
cttccctatttattt

SEQ ID NO: 166992 - DNA, 15 bp, Homo sapiens
ttccctatttatttg

SEQ ID NO: 166993 - DNA, 15 bp, Homo sapiens
tccctatttatttgg

SEQ ID NO: 166994 - DNA, 15 bp, Homo sapiens
ccctatttatttgga

SEQ ID NO: 166995 - DNA, 15 bp, Homo sapiens
cctatttatttggag

SEQ ID NO: 166996 - DNA, 15 bp, Homo sapiens
ctatttatttggaga

SEQ ID NO: 166997 - DNA, 15 bp, Homo sapiens
tatttatttggagaa

SEQ ID NO: 166998 - DNA, 15 bp, Homo sapiens
atttatttggagaaa

SEQ ID NO: 166999 - DNA, 15 bp, Homo sapiens
tttatttggagaaat

SEQ ID NO: 167000 - DNA, 15 bp, Homo sapiens
ttatttggagaaatt

SEQ ID NO: 167001 - DNA, 15 bp, Homo sapiens
tatttggagaaattt

SEQ ID NO: 167002 - DNA, 15 bp, Homo sapiens
atttggagaaattta

SEQ ID NO: 167003 - DNA, 15 bp, Homo sapiens
tttggagaaatttaa

SEQ ID NO: 167004 - DNA, 15 bp, Homo sapiens
ttggagaaatttaat

SEQ ID NO: 167005 - DNA, 15 bp, Homo sapiens
tggagaaatttaatt

SEQ ID NO: 167006 - DNA, 15 bp, Homo sapiens
ggagaaatttaatta

SEQ ID NO: 167007 - DNA, 15 bp, Homo sapiens
gagaaatttaattac

SEQ ID NO: 167008 - DNA, 15 bp, Homo sapiens
agaaatttaattaca

SEQ ID NO: 167009 - DNA, 15 bp, Homo sapiens
gaaatttaattacat

SEQ ID NO: 167010 - DNA, 15 bp, Homo sapiens
aaatttaattacata

SEQ ID NO: 167011 - DNA, 15 bp, Homo sapiens
aatttaattacataa

SEQ ID NO: 167012 - DNA, 15 bp, Homo sapiens
atttaattacataaa

SEQ ID NO: 167013 - DNA, 15 bp, Homo sapiens
tttaattacataaaa

SEQ ID NO: 167014 - DNA, 15 bp, Homo sapiens
ttaattacataaaaa

SEQ ID NO: 167015 - DNA, 15 bp, Homo sapiens
taattacataaaaaa

SEQ ID NO: 167016 - DNA, 15 bp, Homo sapiens
aattacataaaaaag

SEQ ID NO: 167017 - DNA, 15 bp, Homo sapiens
attacataaaaaagt

SEQ ID NO: 167018 - DNA, 15 bp, Homo sapiens
ttacataaaaaagta

SEQ ID NO: 167019 - DNA, 15 bp, Homo sapiens
tacataaaaaagtac

SEQ ID NO: 167020 - DNA, 15 bp, Homo sapiens
acataaaaaagtact

SEQ ID NO: 167021 - DNA, 15 bp, Homo sapiens
cataaaaaagtactc

SEQ ID NO: 167022 - DNA, 15 bp, Homo sapiens
ataaaaaagtactca

SEQ ID NO: 167023 - DNA, 15 bp, Homo sapiens
taaaaaagtactcag

SEQ ID NO: 167024 - DNA, 15 bp, Homo sapiens
aaaaaagtactcaga

SEQ ID NO: 167025 - DNA, 15 bp, Homo sapiens
aaaaagtactcagaa

SEQ ID NO: 167026 - DNA, 15 bp, Homo sapiens
aaaagtactcagaat

SEQ ID NO: 167027 - DNA, 15 bp, Homo sapiens
aaagtactcagaata

SEQ ID NO: 167028 - DNA, 15 bp, Homo sapiens
aagtactcagaatat

SEQ ID NO: 167029 - DNA, 15 bp, Homo sapiens
agtactcagaatatt

SEQ ID NO: 167030 - DNA, 15 bp, Homo sapiens
gtactcagaatattt

SEQ ID NO: 167031 - DNA, 15 bp, Homo sapiens
tactcagaatatttg

SEQ ID NO: 167032 - DNA, 15 bp, Homo sapiens
actcagaatatttga

SEQ ID NO: 167033 - DNA, 15 bp, Homo sapiens
ctcagaatatttgag

SEQ ID NO: 167034 - DNA, 15 bp, Homo sapiens
tcagaatatttgagt

SEQ ID NO: 167035 - DNA, 15 bp, Homo sapiens
cagaatatttgagtt

SEQ ID NO: 167036 - DNA, 15 bp, Homo sapiens
agaatatttgagttt

SEQ ID NO: 167037 - DNA, 15 bp, Homo sapiens
gaatatttgagtttc

SEQ ID NO: 167038 - DNA, 15 bp, Homo sapiens
aatatttgagtttcc

SEQ ID NO: 167039 - DNA, 15 bp, Homo sapiens
atatttgagtttcct

SEQ ID NO: 167040 - DNA, 15 bp, Homo sapiens
tatttgagtttcctg

SEQ ID NO: 167041 - DNA, 15 bp, Homo sapiens
atttgagtttcctgc

SEQ ID NO: 167042 - DNA, 15 bp, Homo sapiens
tttgagtttcctgca

SEQ ID NO: 167043 - DNA, 15 bp, Homo sapiens
ttgagtttcctgcat

SEQ ID NO: 167044 - DNA, 15 bp, Homo sapiens
tgagtttcctgcatc

SEQ ID NO: 167045 - DNA, 15 bp, Homo sapiens
gagtttcctgcatca

SEQ ID NO: 167046 - DNA, 15 bp, Homo sapiens
agtttcctgcatcaa

SEQ ID NO: 167047 - DNA, 15 bp, Homo sapiens
gtttcctgcatcaat

SEQ ID NO: 167048 - DNA, 15 bp, Homo sapiens
tttcctgcatcaata

SEQ ID NO: 167049 - DNA, 15 bp, Homo sapiens
ttcctgcatcaataa

SEQ ID NO: 167050 - DNA, 15 bp, Homo sapiens
tcctgcatcaataag

SEQ ID NO: 167051 - DNA, 15 bp, Homo sapiens
cctgcatcaataaga

SEQ ID NO: 167052 - DNA, 15 bp, Homo sapiens
ctgcatcaataagac

SEQ ID NO: 167053 - DNA, 15 bp, Homo sapiens
tgcatcaataagaca

SEQ ID NO: 167054 - DNA, 15 bp, Homo sapiens
gcatcaataagacat

SEQ ID NO: 167055 - DNA, 15 bp, Homo sapiens
catcaataagacatt

SEQ ID NO: 167056 - DNA, 15 bp, Homo sapiens
atcaataagacattt

SEQ ID NO: 167057 - DNA, 15 bp, Homo sapiens
tcaataagacattta

SEQ ID NO: 167058 - DNA, 15 bp, Homo sapiens
caataagacatttat

SEQ ID NO: 167059 - DNA, 15 bp, Homo sapiens
aataagacatttata

SEQ ID NO: 167060 - DNA, 15 bp, Homo sapiens
ataagacatttataa

SEQ ID NO: 167061 - DNA, 15 bp, Homo sapiens
taagacatttataat

SEQ ID NO: 167062 - DNA, 15 bp, Homo sapiens
aagacatttataata

SEQ ID NO: 167063 - DNA, 15 bp, Homo sapiens
agacatttataataa

SEQ ID NO: 167064 - DNA, 15 bp, Homo sapiens
gacatttataataat

SEQ ID NO: 167065 - DNA, 15 bp, Homo sapiens
acatttataataatg

SEQ ID NO: 167066 - DNA, 15 bp, Homo sapiens
catttataataatga

SEQ ID NO: 167067 - DNA, 15 bp, Homo sapiens
atttataataatgac

SEQ ID NO: 167068 - DNA, 15 bp, Homo sapiens
tttataataatgacc

SEQ ID NO: 167069 - DNA, 15 bp, Homo sapiens
ttataataatgacct

SEQ ID NO: 167070 - DNA, 15 bp, Homo sapiens
tataataatgacctt

SEQ ID NO: 167071 - DNA, 15 bp, Homo sapiens
ataataatgaccttg

SEQ ID NO: 167072 - DNA, 15 bp, Homo sapiens
taataatgaccttgt

SEQ ID NO: 167073 - DNA, 15 bp, Homo sapiens
aataatgaccttgtt

SEQ ID NO: 167074 - DNA, 15 bp, Homo sapiens
ataatgaccttgttt

SEQ ID NO: 167075 - DNA, 15 bp, Homo sapiens
taatgaccttgttta

SEQ ID NO: 167076 - DNA, 15 bp, Homo sapiens
aatgaccttgtttac

SEQ ID NO: 167077 - DNA, 15 bp, Homo sapiens
atgaccttgtttaca

SEQ ID NO: 167078 - DNA, 15 bp, Homo sapiens
tgaccttgtttacaa

SEQ ID NO: 167079 - DNA, 15 bp, Homo sapiens
gaccttgtttacaaa

SEQ ID NO: 167080 - DNA, 15 bp, Homo sapiens
accttgtttacaaat

SEQ ID NO: 167081 - DNA, 15 bp, Homo sapiens
ccttgtttacaaatg

SEQ ID NO: 167082 - DNA, 15 bp, Homo sapiens
cttgtttacaaatga

SEQ ID NO: 167083 - DNA, 15 bp, Homo sapiens
ttgtttacaaatgaa

SEQ ID NO: 167084 - DNA, 15 bp, Homo sapiens
tgtttacaaatgaat

SEQ ID NO: 167085 - DNA, 15 bp, Homo sapiens
gtttacaaatgaatt

SEQ ID NO: 167086 - DNA, 15 bp, Homo sapiens
tttacaaatgaattt

SEQ ID NO: 167087 - DNA, 15 bp, Homo sapiens
ttacaaatgaatttg

SEQ ID NO: 167088 - DNA, 15 bp, Homo sapiens
tacaaatgaatttga

SEQ ID NO: 167089 - DNA, 15 bp, Homo sapiens
acaaatgaatttgaa

SEQ ID NO: 167090 - DNA, 15 bp, Homo sapiens
caaatgaatttgaaa

SEQ ID NO: 167091 - DNA, 15 bp, Homo sapiens
aaatgaatttgaaag

SEQ ID NO: 167092 - DNA, 15 bp, Homo sapiens
aatgaatttgaaagt

SEQ ID NO: 167093 - DNA, 15 bp, Homo sapiens
atgaatttgaaagtt

SEQ ID NO: 167094 - DNA, 15 bp, Homo sapiens
tgaatttgaaagtta

SEQ ID NO: 167095 - DNA, 15 bp, Homo sapiens
gaatttgaaagttac

SEQ ID NO: 167096 - DNA, 15 bp, Homo sapiens
aatttgaaagttact

SEQ ID NO: 167097 - DNA, 15 bp, Homo sapiens
atttgaaagttactc

SEQ ID NO: 167098 - DNA, 15 bp, Homo sapiens
tttgaaagttactct

SEQ ID NO: 167099 - DNA, 15 bp, Homo sapiens
ttgaaagttactcta

SEQ ID NO: 167100 - DNA, 15 bp, Homo sapiens
tgaaagttactctaa

SEQ ID NO: 167101 - DNA, 15 bp, Homo sapiens
gaaagttactctaat

SEQ ID NO: 167102 - DNA, 15 bp, Homo sapiens
aaagttactctaatt

SEQ ID NO: 167103 - DNA, 15 bp, Homo sapiens
aagttactctaattc

SEQ ID NO: 167104 - DNA, 15 bp, Homo sapiens
agttactctaattct

SEQ ID NO: 167105 - DNA, 15 bp, Homo sapiens
gttactctaattctt

SEQ ID NO: 167106 - DNA, 15 bp, Homo sapiens
ttactctaattcttt

SEQ ID NO: 167107 - DNA, 15 bp, Homo sapiens
tactctaattctttg

SEQ ID NO: 167108 - DNA, 15 bp, Homo sapiens
actctaattctttga

SEQ ID NO: 167109 - DNA, 15 bp, Homo sapiens
ctctaattctttgat

SEQ ID NO: 167110 - DNA, 15 bp, Homo sapiens
tctaattctttgatt

SEQ ID NO: 167111 - DNA, 15 bp, Homo sapiens
ctaattctttgattc

SEQ ID NO: 167112 - DNA, 15 bp, Homo sapiens
taattctttgattca

SEQ ID NO: 167113 - DNA, 15 bp, Homo sapiens
aattctttgattcat

SEQ ID NO: 167114 - DNA, 15 bp, Homo sapiens
attctttgattcatc

SEQ ID NO: 167115 - DNA, 15 bp, Homo sapiens
ttctttgattcatca

SEQ ID NO: 167116 - DNA, 15 bp, Homo sapiens
tctttgattcatcaa

SEQ ID NO: 167117 - DNA, 15 bp, Homo sapiens
ctttgattcatcaag

SEQ ID NO: 167118 - DNA, 15 bp, Homo sapiens
tttgattcatcaaga

SEQ ID NO: 167119 - DNA, 15 bp, Homo sapiens
ttgattcatcaagaa

SEQ ID NO: 167120 - DNA, 15 bp, Homo sapiens
tgattcatcaagaaa

SEQ ID NO: 167121 - DNA, 15 bp, Homo sapiens
gattcatcaagaaat

SEQ ID NO: 167122 - DNA, 15 bp, Homo sapiens
attcatcaagaaata

SEQ ID NO: 167123 - DNA, 15 bp, Homo sapiens
ttcatcaagaaataa

SEQ ID NO: 167124 - DNA, 15 bp, Homo sapiens
tcatcaagaaataac

SEQ ID NO: 167125 - DNA, 15 bp, Homo sapiens
catcaagaaataact

SEQ ID NO: 167126 - DNA, 15 bp, Homo sapiens
atcaagaaataacta

SEQ ID NO: 167127 - DNA, 15 bp, Homo sapiens
tcaagaaataactag

SEQ ID NO: 167128 - DNA, 15 bp, Homo sapiens
caagaaataactaga

SEQ ID NO: 167129 - DNA, 15 bp, Homo sapiens
aagaaataactagaa

SEQ ID NO: 167130 - DNA, 15 bp, Homo sapiens
agaaataactagaat

SEQ ID NO: 167131 - DNA, 15 bp, Homo sapiens
gaaataactagaatg

SEQ ID NO: 167132 - DNA, 15 bp, Homo sapiens
aaataactagaatgg

SEQ ID NO: 167133 - DNA, 15 bp, Homo sapiens
aataactagaatggc

SEQ ID NO: 167134 - DNA, 15 bp, Homo sapiens
ataactagaatggca

SEQ ID NO: 167135 - DNA, 15 bp, Homo sapiens
taactagaatggcaa

SEQ ID NO: 167136 - DNA, 15 bp, Homo sapiens
aactagaatggcaag

SEQ ID NO: 167137 - DNA, 15 bp, Homo sapiens
actagaatggcaagt

SEQ ID NO: 167138 - DNA, 15 bp, Homo sapiens
ctagaatggcaagtt

SEQ ID NO: 167139 - DNA, 15 bp, Homo sapiens
tagaatggcaagtta

SEQ ID NO: 167140 - DNA, 15 bp, Homo sapiens
agaatggcaagttaa

SEQ ID NO: 167141 - DNA, 15 bp, Homo sapiens
gaatggcaagttaaa

SEQ ID NO: 167142 - DNA, 15 bp, Homo sapiens
aatggcaagttaaaa

SEQ ID NO: 167143 - DNA, 15 bp, Homo sapiens
atggcaagttaaaat

SEQ ID NO: 167144 - DNA, 15 bp, Homo sapiens
tggcaagttaaaatt

SEQ ID NO: 167145 - DNA, 15 bp, Homo sapiens
ggcaagttaaaattt

SEQ ID NO: 167146 - DNA, 15 bp, Homo sapiens
gcaagttaaaattta

SEQ ID NO: 167147 - DNA, 15 bp, Homo sapiens
caagttaaaatttaa

SEQ ID NO: 167148 - DNA, 15 bp, Homo sapiens
aagttaaaatttaag

SEQ ID NO: 167149 - DNA, 15 bp, Homo sapiens
agttaaaatttaagc

SEQ ID NO: 167150 - DNA, 15 bp, Homo sapiens
gttaaaatttaagct

SEQ ID NO: 167151 - DNA, 15 bp, Homo sapiens
ttaaaatttaagctg

SEQ ID NO: 167152 - DNA, 15 bp, Homo sapiens
taaaatttaagctgt

SEQ ID NO: 167153 - DNA, 15 bp, Homo sapiens
aaaatttaagctgtt

SEQ ID NO: 167154 - DNA, 15 bp, Homo sapiens
aaatttaagctgttt

SEQ ID NO: 167155 - DNA, 15 bp, Homo sapiens
aatttaagctgtttc

SEQ ID NO: 167156 - DNA, 15 bp, Homo sapiens
atttaagctgtttca

SEQ ID NO: 167157 - DNA, 15 bp, Homo sapiens
tttaagctgtttcaa

SEQ ID NO: 167158 - DNA, 15 bp, Homo sapiens
ttaagctgtttcaaa

SEQ ID NO: 167159 - DNA, 15 bp, Homo sapiens
taagctgtttcaaag

SEQ ID NO: 167160 - DNA, 15 bp, Homo sapiens
aagctgtttcaaaga

SEQ ID NO: 167161 - DNA, 15 bp, Homo sapiens
agctgtttcaaagat

SEQ ID NO: 167162 - DNA, 15 bp, Homo sapiens
gctgtttcaaagatg

SEQ ID NO: 167163 - DNA, 15 bp, Homo sapiens
ctgtttcaaagatgc

SEQ ID NO: 167164 - DNA, 15 bp, Homo sapiens
tgtttcaaagatgct

SEQ ID NO: 167165 - DNA, 15 bp, Homo sapiens
gtttcaaagatgctt

SEQ ID NO: 167166 - DNA, 15 bp, Homo sapiens
tttcaaagatgcttc

SEQ ID NO: 167167 - DNA, 15 bp, Homo sapiens
ttcaaagatgcttct

SEQ ID NO: 167168 - DNA, 15 bp, Homo sapiens
tcaaagatgcttctg

SEQ ID NO: 167169 - DNA, 15 bp, Homo sapiens
caaagatgcttctgc

SEQ ID NO: 167170 - DNA, 15 bp, Homo sapiens
aaagatgcttctgca

SEQ ID NO: 167171 - DNA, 15 bp, Homo sapiens
aagatgcttctgcat

SEQ ID NO: 167172 - DNA, 15 bp, Homo sapiens
agatgcttctgcatt

SEQ ID NO: 167173 - DNA, 15 bp, Homo sapiens
gatgcttctgcattt

SEQ ID NO: 167174 - DNA, 15 bp, Homo sapiens
atgcttctgcattta

SEQ ID NO: 167175 - DNA, 15 bp, Homo sapiens
tgcttctgcatttaa

SEQ ID NO: 167176 - DNA, 15 bp, Homo sapiens
gcttctgcatttaaa

SEQ ID NO: 167177 - DNA, 15 bp, Homo sapiens
cttctgcatttaaaa

SEQ ID NO: 167178 - DNA, 15 bp, Homo sapiens
ttctgcatttaaaaa

SEQ ID NO: 167179 - DNA, 15 bp, Homo sapiens
tctgcatttaaaaac

SEQ ID NO: 167180 - DNA, 15 bp, Homo sapiens
ctgcatttaaaaaca

SEQ ID NO: 167181 - DNA, 15 bp, Homo sapiens
tgcatttaaaaacaa

SEQ ID NO: 167182 - DNA, 15 bp, Homo sapiens
gcatttaaaaacaaa

SEQ ID NO: 167183 - DNA, 15 bp, Homo sapiens
catttaaaaacaaat

SEQ ID NO: 167184 - DNA, 15 bp, Homo sapiens
atttaaaaacaaatt

SEQ ID NO: 167185 - DNA, 15 bp, Homo sapiens
tttaaaaacaaattt

SEQ ID NO: 167186 - DNA, 15 bp, Homo sapiens
ttaaaaacaaattta

SEQ ID NO: 167187 - DNA, 15 bp, Homo sapiens
taaaaacaaatttat

SEQ ID NO: 167188 - DNA, 15 bp, Homo sapiens
aaaaacaaatttatc

SEQ ID NO: 167189 - DNA, 15 bp, Homo sapiens
aaaacaaatttatct

SEQ ID NO: 167190 - DNA, 15 bp, Homo sapiens
aaacaaatttatctt

SEQ ID NO: 167191 - DNA, 15 bp, Homo sapiens
aacaaatttatcttt

SEQ ID NO: 167192 - DNA, 15 bp, Homo sapiens
acaaatttatctttg

SEQ ID NO: 167193 - DNA, 15 bp, Homo sapiens
caaatttatctttga

SEQ ID NO: 167194 - DNA, 15 bp, Homo sapiens
aaatttatctttgat

SEQ ID NO: 167195 - DNA, 15 bp, Homo sapiens
aatttatctttgatt

SEQ ID NO: 167196 - DNA, 15 bp, Homo sapiens
atttatctttgattt

SEQ ID NO: 167197 - DNA, 15 bp, Homo sapiens
tttatctttgatttt

SEQ ID NO: 167198 - DNA, 15 bp, Homo sapiens
ttatctttgattttt

SEQ ID NO: 167199 - DNA, 15 bp, Homo sapiens
tatctttgatttttt

SEQ ID NO: 167200 - DNA, 15 bp, Homo sapiens
atctttgattttttt

SEQ ID NO: 167201 - DNA, 15 bp, Homo sapiens
tctttgatttttttt

SEQ ID NO: 167202 - DNA, 15 bp, Homo sapiens
ctttgattttttttc

SEQ ID NO: 167203 - DNA, 15 bp, Homo sapiens
tttgattttttttcc

SEQ ID NO: 167204 - DNA, 15 bp, Homo sapiens
ttgattttttttccc

SEQ ID NO: 167205 - DNA, 15 bp, Homo sapiens
tgattttttttcccc

SEQ ID NO: 167206 - DNA, 15 bp, Homo sapiens
gattttttttccccc

SEQ ID NO: 167207 - DNA, 15 bp, Homo sapiens
attttttttcccccc

SEQ ID NO: 167208 - DNA, 15 bp, Homo sapiens
ttttttttcccccca

SEQ ID NO: 167209 - DNA, 15 bp, Homo sapiens
tttttttccccccag

SEQ ID NO: 167210 - DNA, 15 bp, Homo sapiens
ttttttccccccagc

SEQ ID NO: 167211 - DNA, 15 bp, Homo sapiens
tttttccccccagca

SEQ ID NO: 167212 - DNA, 15 bp, Homo sapiens
ttttccccccagcaa

SEQ ID NO: 167213 - DNA, 15 bp, Homo sapiens
tttccccccagcaaa

SEQ ID NO: 167214 - DNA, 15 bp, Homo sapiens
ttccccccagcaaat

SEQ ID NO: 167215 - DNA, 15 bp, Homo sapiens
tccccccagcaaata

SEQ ID NO: 167216 - DNA, 15 bp, Homo sapiens
ccccccagcaaataa

SEQ ID NO: 167217 - DNA, 15 bp, Homo sapiens
cccccagcaaataag

SEQ ID NO: 167218 - DNA, 15 bp, Homo sapiens
ccccagcaaataaga

SEQ ID NO: 167219 - DNA, 15 bp, Homo sapiens
cccagcaaataagac

SEQ ID NO: 167220 - DNA, 15 bp, Homo sapiens
ccagcaaataagact

SEQ ID NO: 167221 - DNA, 15 bp, Homo sapiens
cagcaaataagactt

SEQ ID NO: 167222 - DNA, 15 bp, Homo sapiens
agcaaataagactta

SEQ ID NO: 167223 - DNA, 15 bp, Homo sapiens
gcaaataagacttat

SEQ ID NO: 167224 - DNA, 15 bp, Homo sapiens
caaataagacttatt

SEQ ID NO: 167225 - DNA, 15 bp, Homo sapiens
aaataagacttattt

SEQ ID NO: 167226 - DNA, 15 bp, Homo sapiens
aataagacttatttt

SEQ ID NO: 167227 - DNA, 15 bp, Homo sapiens
ataagacttatttta

SEQ ID NO: 167228 - DNA, 15 bp, Homo sapiens
taagacttattttat

SEQ ID NO: 167229 - DNA, 15 bp, Homo sapiens
aagacttattttatt

SEQ ID NO: 167230 - DNA, 15 bp, Homo sapiens
agacttattttattc

SEQ ID NO: 167231 - DNA, 15 bp, Homo sapiens
gacttattttattct

SEQ ID NO: 167232 - DNA, 15 bp, Homo sapiens
acttattttattcta

SEQ ID NO: 167233 - DNA, 15 bp, Homo sapiens
cttattttattctaa

SEQ ID NO: 167234 - DNA, 15 bp, Homo sapiens
ttattttattctaat

SEQ ID NO: 167235 - DNA, 15 bp, Homo sapiens
tattttattctaatt

SEQ ID NO: 167236 - DNA, 15 bp, Homo sapiens
attttattctaatta

SEQ ID NO: 167237 - DNA, 15 bp, Homo sapiens
ttttattctaattac

SEQ ID NO: 167238 - DNA, 15 bp, Homo sapiens
tttattctaattaca

SEQ ID NO: 167239 - DNA, 15 bp, Homo sapiens
ttattctaattacag

SEQ ID NO: 167240 - DNA, 15 bp, Homo sapiens
tattctaattacagg

SEQ ID NO: 167241 - DNA, 15 bp, Homo sapiens
attctaattacagga

SEQ ID NO: 167242 - DNA, 15 bp, Homo sapiens
ttctaattacaggat

SEQ ID NO: 167243 - DNA, 15 bp, Homo sapiens
tctaattacaggatg

SEQ ID NO: 167244 - DNA, 15 bp, Homo sapiens
ctaattacaggatga

SEQ ID NO: 167245 - DNA, 15 bp, Homo sapiens
taattacaggatgaa

SEQ ID NO: 167246 - DNA, 15 bp, Homo sapiens
aattacaggatgaac

SEQ ID NO: 167247 - DNA, 15 bp, Homo sapiens
attacaggatgaacc

SEQ ID NO: 167248 - DNA, 15 bp, Homo sapiens
ttacaggatgaaccc

SEQ ID NO: 167249 - DNA, 15 bp, Homo sapiens
tacaggatgaaccca

SEQ ID NO: 167250 - DNA, 15 bp, Homo sapiens
acaggatgaacccac

SEQ ID NO: 167251 - DNA, 15 bp, Homo sapiens
caggatgaacccacc

SEQ ID NO: 167252 - DNA, 15 bp, Homo sapiens
aggatgaacccacca

SEQ ID NO: 167253 - DNA, 15 bp, Homo sapiens
ggatgaacccaccac

SEQ ID NO: 167254 - DNA, 15 bp, Homo sapiens
gatgaacccaccaca

SEQ ID NO: 167255 - DNA, 15 bp, Homo sapiens
atgaacccaccacag

SEQ ID NO: 167256 - DNA, 15 bp, Homo sapiens
tgaacccaccacagg

SEQ ID NO: 167257 - DNA, 15 bp, Homo sapiens
gaacccaccacaggc

SEQ ID NO: 167258 - DNA, 15 bp, Homo sapiens
aacccaccacaggca

SEQ ID NO: 167259 - DNA, 15 bp, Homo sapiens
acccaccacaggcat

SEQ ID NO: 167260 - DNA, 15 bp, Homo sapiens
cccaccacaggcatg

SEQ ID NO: 167261 - DNA, 15 bp, Homo sapiens
ccaccacaggcatgg

SEQ ID NO: 167262 - DNA, 15 bp, Homo sapiens
caccacaggcatgga

SEQ ID NO: 167263 - DNA, 15 bp, Homo sapiens
accacaggcatggat

SEQ ID NO: 167264 - DNA, 15 bp, Homo sapiens
ccacaggcatggatc

SEQ ID NO: 167265 - DNA, 15 bp, Homo sapiens
cacaggcatggatcc

SEQ ID NO: 167266 - DNA, 15 bp, Homo sapiens
acaggcatggatccc

SEQ ID NO: 167267 - DNA, 15 bp, Homo sapiens
caggcatggatccca

SEQ ID NO: 167268 - DNA, 15 bp, Homo sapiens
aggcatggatcccaa

SEQ ID NO: 167269 - DNA, 15 bp, Homo sapiens
ggcatggatcccaaa

SEQ ID NO: 167270 - DNA, 15 bp, Homo sapiens
gcatggatcccaaag

SEQ ID NO: 167271 - DNA, 15 bp, Homo sapiens
catggatcccaaagc

SEQ ID NO: 167272 - DNA, 15 bp, Homo sapiens
atggatcccaaagcc

SEQ ID NO: 167273 - DNA, 15 bp, Homo sapiens
tggatcccaaagccc

SEQ ID NO: 167274 - DNA, 15 bp, Homo sapiens
ggatcccaaagcccg

SEQ ID NO: 167275 - DNA, 15 bp, Homo sapiens
gatcccaaagcccgg

SEQ ID NO: 167276 - DNA, 15 bp, Homo sapiens
atcccaaagcccggc

SEQ ID NO: 167277 - DNA, 15 bp, Homo sapiens
tcccaaagcccggcg

SEQ ID NO: 167278 - DNA, 15 bp, Homo sapiens
cccaaagcccggcgg

SEQ ID NO: 167279 - DNA, 15 bp, Homo sapiens
ccaaagcccggcggt

SEQ ID NO: 167280 - DNA, 15 bp, Homo sapiens
caaagcccggcggtt

SEQ ID NO: 167281 - DNA, 15 bp, Homo sapiens
aaagcccggcggttc

SEQ ID NO: 167282 - DNA, 15 bp, Homo sapiens
aagcccggcggttct

SEQ ID NO: 167283 - DNA, 15 bp, Homo sapiens
agcccggcggttctt

SEQ ID NO: 167284 - DNA, 15 bp, Homo sapiens
gcccggcggttcttg

SEQ ID NO: 167285 - DNA, 15 bp, Homo sapiens
cccggcggttcttgt

SEQ ID NO: 167286 - DNA, 15 bp, Homo sapiens
ccggcggttcttgtg

SEQ ID NO: 167287 - DNA, 15 bp, Homo sapiens
cggcggttcttgtgg

SEQ ID NO: 167288 - DNA, 15 bp, Homo sapiens
ggcggttcttgtgga

SEQ ID NO: 167289 - DNA, 15 bp, Homo sapiens
gcggttcttgtggaa

SEQ ID NO: 167290 - DNA, 15 bp, Homo sapiens
cggttcttgtggaat

SEQ ID NO: 167291 - DNA, 15 bp, Homo sapiens
ggttcttgtggaatt

SEQ ID NO: 167292 - DNA, 15 bp, Homo sapiens
gttcttgtggaattg

SEQ ID NO: 167293 - DNA, 15 bp, Homo sapiens
ttcttgtggaattgt

SEQ ID NO: 167294 - DNA, 15 bp, Homo sapiens
tcttgtggaattgtg

SEQ ID NO: 167295 - DNA, 15 bp, Homo sapiens
cttgtggaattgtgc

SEQ ID NO: 167296 - DNA, 15 bp, Homo sapiens
ttgtggaattgtgcc

SEQ ID NO: 167297 - DNA, 15 bp, Homo sapiens
tgtggaattgtgccc

SEQ ID NO: 167298 - DNA, 15 bp, Homo sapiens
gtggaattgtgccct

SEQ ID NO: 167299 - DNA, 15 bp, Homo sapiens
tggaattgtgcccta

SEQ ID NO: 167300 - DNA, 15 bp, Homo sapiens
ggaattgtgccctaa

SEQ ID NO: 167301 - DNA, 15 bp, Homo sapiens
gaattgtgccctaag

SEQ ID NO: 167302 - DNA, 15 bp, Homo sapiens
aattgtgccctaagt

SEQ ID NO: 167303 - DNA, 15 bp, Homo sapiens
attgtgccctaagtg

SEQ ID NO: 167304 - DNA, 15 bp, Homo sapiens
ttgtgccctaagtgt

SEQ ID NO: 167305 - DNA, 15 bp, Homo sapiens
tgtgccctaagtgtt

SEQ ID NO: 167306 - DNA, 15 bp, Homo sapiens
gtgccctaagtgttg

SEQ ID NO: 167307 - DNA, 15 bp, Homo sapiens
tgccctaagtgttgt

SEQ ID NO: 167308 - DNA, 15 bp, Homo sapiens
gccctaagtgttgtc

SEQ ID NO: 167309 - DNA, 15 bp, Homo sapiens
ccctaagtgttgtca

SEQ ID NO: 167310 - DNA, 15 bp, Homo sapiens
cctaagtgttgtcaa

SEQ ID NO: 167311 - DNA, 15 bp, Homo sapiens
ctaagtgttgtcaag

SEQ ID NO: 167312 - DNA, 15 bp, Homo sapiens
taagtgttgtcaagg

SEQ ID NO: 167313 - DNA, 15 bp, Homo sapiens
aagtgttgtcaagga

SEQ ID NO: 167314 - DNA, 15 bp, Homo sapiens
agtgttgtcaaggag

SEQ ID NO: 167315 - DNA, 15 bp, Homo sapiens
gtgttgtcaaggagg

SEQ ID NO: 167316 - DNA, 15 bp, Homo sapiens
tgttgtcaaggaggg

SEQ ID NO: 167317 - DNA, 15 bp, Homo sapiens
gttgtcaaggagggg

SEQ ID NO: 167318 - DNA, 15 bp, Homo sapiens
ttgtcaaggagggga

SEQ ID NO: 167319 - DNA, 15 bp, Homo sapiens
tgtcaaggaggggag

SEQ ID NO: 167320 - DNA, 15 bp, Homo sapiens
gtcaaggaggggaga

SEQ ID NO: 167321 - DNA, 15 bp, Homo sapiens
tcaaggaggggagat

SEQ ID NO: 167322 - DNA, 15 bp, Homo sapiens
caaggaggggagatc

SEQ ID NO: 167323 - DNA, 15 bp, Homo sapiens
aaggaggggagatca

SEQ ID NO: 167324 - DNA, 15 bp, Homo sapiens
aggaggggagatcag

SEQ ID NO: 167325 - DNA, 15 bp, Homo sapiens
ggaggggagatcagt

SEQ ID NO: 167326 - DNA, 15 bp, Homo sapiens
gaggggagatcagta

SEQ ID NO: 167327 - DNA, 15 bp, Homo sapiens
aggggagatcagtag

SEQ ID NO: 167328 - DNA, 15 bp, Homo sapiens
ggggagatcagtagt

SEQ ID NO: 167329 - DNA, 15 bp, Homo sapiens
gggagatcagtagtg

SEQ ID NO: 167330 - DNA, 15 bp, Homo sapiens
ggagatcagtagtgc

SEQ ID NO: 167331 - DNA, 15 bp, Homo sapiens
gagatcagtagtgct

SEQ ID NO: 167332 - DNA, 15 bp, Homo sapiens
agatcagtagtgctt

SEQ ID NO: 167333 - DNA, 15 bp, Homo sapiens
gatcagtagtgctta

SEQ ID NO: 167334 - DNA, 15 bp, Homo sapiens
atcagtagtgcttac

SEQ ID NO: 167335 - DNA, 15 bp, Homo sapiens
tcagtagtgcttaca

SEQ ID NO: 167336 - DNA, 15 bp, Homo sapiens
cagtagtgcttacat

SEQ ID NO: 167337 - DNA, 15 bp, Homo sapiens
agtagtgcttacatc

SEQ ID NO: 167338 - DNA, 15 bp, Homo sapiens
gtagtgcttacatct

SEQ ID NO: 167339 - DNA, 15 bp, Homo sapiens
tagtgcttacatctc

SEQ ID NO: 167340 - DNA, 15 bp, Homo sapiens
agtgcttacatctca

SEQ ID NO: 167341 - DNA, 15 bp, Homo sapiens
gtgcttacatctcat

SEQ ID NO: 167342 - DNA, 15 bp, Homo sapiens
tgcttacatctcata

SEQ ID NO: 167343 - DNA, 15 bp, Homo sapiens
gcttacatctcatag

SEQ ID NO: 167344 - DNA, 15 bp, Homo sapiens
cttacatctcatagg

SEQ ID NO: 167345 - DNA, 15 bp, Homo sapiens
ttacatctcataggt

SEQ ID NO: 167346 - DNA, 15 bp, Homo sapiens
tacatctcataggtc

SEQ ID NO: 167347 - DNA, 15 bp, Homo sapiens
acatctcataggtcc

SEQ ID NO: 167348 - DNA, 15 bp, Homo sapiens
catctcataggtccg

SEQ ID NO: 167349 - DNA, 15 bp, Homo sapiens
atctcataggtccgt

SEQ ID NO: 167350 - DNA, 15 bp, Homo sapiens
tctcataggtccgta

SEQ ID NO: 167351 - DNA, 15 bp, Homo sapiens
ctcataggtccgtag

SEQ ID NO: 167352 - DNA, 15 bp, Homo sapiens
tcataggtccgtagt

SEQ ID NO: 167353 - DNA, 15 bp, Homo sapiens
cataggtccgtagta

SEQ ID NO: 167354 - DNA, 15 bp, Homo sapiens
ataggtccgtagtaa

SEQ ID NO: 167355 - DNA, 15 bp, Homo sapiens
taggtccgtagtaaa

SEQ ID NO: 167356 - DNA, 15 bp, Homo sapiens
aggtccgtagtaaag

SEQ ID NO: 167357 - DNA, 15 bp, Homo sapiens
ggtccgtagtaaagt

SEQ ID NO: 167358 - DNA, 15 bp, Homo sapiens
gtccgtagtaaagtc

SEQ ID NO: 167359 - DNA, 15 bp, Homo sapiens
tccgtagtaaagtct

SEQ ID NO: 167360 - DNA, 15 bp, Homo sapiens
ccgtagtaaagtctt

SEQ ID NO: 167361 - DNA, 15 bp, Homo sapiens
cgtagtaaagtcttg

SEQ ID NO: 167362 - DNA, 15 bp, Homo sapiens
gtagtaaagtcttgg

SEQ ID NO: 167363 - DNA, 15 bp, Homo sapiens
tagtaaagtcttggg

SEQ ID NO: 167364 - DNA, 15 bp, Homo sapiens
agtaaagtcttgggt

SEQ ID NO: 167365 - DNA, 15 bp, Homo sapiens
gtaaagtcttgggtt

SEQ ID NO: 167366 - DNA, 15 bp, Homo sapiens
taaagtcttgggttc

SEQ ID NO: 167367 - DNA, 15 bp, Homo sapiens
aaagtcttgggttcc

SEQ ID NO: 167368 - DNA, 15 bp, Homo sapiens
aagtcttgggttcct

SEQ ID NO: 167369 - DNA, 15 bp, Homo sapiens
agtcttgggttcctc

SEQ ID NO: 167370 - DNA, 15 bp, Homo sapiens
gtcttgggttcctca

SEQ ID NO: 167371 - DNA, 15 bp, Homo sapiens
tcttgggttcctcac

SEQ ID NO: 167372 - DNA, 15 bp, Homo sapiens
cttgggttcctcact

SEQ ID NO: 167373 - DNA, 15 bp, Homo sapiens
ttgggttcctcactg

SEQ ID NO: 167374 - DNA, 15 bp, Homo sapiens
tgggttcctcactgt

SEQ ID NO: 167375 - DNA, 15 bp, Homo sapiens
gggttcctcactgtg

SEQ ID NO: 167376 - DNA, 15 bp, Homo sapiens
ggttcctcactgtgg

SEQ ID NO: 167377 - DNA, 15 bp, Homo sapiens
gttcctcactgtggg

SEQ ID NO: 167378 - DNA, 15 bp, Homo sapiens
ttcctcactgtggga

SEQ ID NO: 167379 - DNA, 15 bp, Homo sapiens
tcctcactgtgggat

SEQ ID NO: 167380 - DNA, 15 bp, Homo sapiens
cctcactgtgggatg

SEQ ID NO: 167381 - DNA, 15 bp, Homo sapiens
ctcactgtgggatgt

SEQ ID NO: 167382 - DNA, 15 bp, Homo sapiens
tcactgtgggatgtt

SEQ ID NO: 167383 - DNA, 15 bp, Homo sapiens
cactgtgggatgttt

SEQ ID NO: 167384 - DNA, 15 bp, Homo sapiens
actgtgggatgtttt

SEQ ID NO: 167385 - DNA, 15 bp, Homo sapiens
ctgtgggatgtttta

SEQ ID NO: 167386 - DNA, 15 bp, Homo sapiens
tgtgggatgttttaa

SEQ ID NO: 167387 - DNA, 15 bp, Homo sapiens
gtgggatgttttaac

SEQ ID NO: 167388 - DNA, 15 bp, Homo sapiens
tgggatgttttaact

SEQ ID NO: 167389 - DNA, 15 bp, Homo sapiens
gggatgttttaactt

SEQ ID NO: 167390 - DNA, 15 bp, Homo sapiens
ggatgttttaacttt

SEQ ID NO: 167391 - DNA, 15 bp, Homo sapiens
gatgttttaactttc

SEQ ID NO: 167392 - DNA, 15 bp, Homo sapiens
atgttttaactttcc

SEQ ID NO: 167393 - DNA, 15 bp, Homo sapiens
tgttttaactttcca

SEQ ID NO: 167394 - DNA, 15 bp, Homo sapiens
gttttaactttccaa

SEQ ID NO: 167395 - DNA, 15 bp, Homo sapiens
ttttaactttccaag

SEQ ID NO: 167396 - DNA, 15 bp, Homo sapiens
tttaactttccaagt

SEQ ID NO: 167397 - DNA, 15 bp, Homo sapiens
ttaactttccaagta

SEQ ID NO: 167398 - DNA, 15 bp, Homo sapiens
taactttccaagtag

SEQ ID NO: 167399 - DNA, 15 bp, Homo sapiens
aactttccaagtaga

SEQ ID NO: 167400 - DNA, 15 bp, Homo sapiens
actttccaagtagaa

SEQ ID NO: 167401 - DNA, 15 bp, Homo sapiens
ctttccaagtagaat

SEQ ID NO: 167402 - DNA, 15 bp, Homo sapiens
tttccaagtagaata

SEQ ID NO: 167403 - DNA, 15 bp, Homo sapiens
ttccaagtagaatat

SEQ ID NO: 167404 - DNA, 15 bp, Homo sapiens
tccaagtagaatatg

SEQ ID NO: 167405 - DNA, 15 bp, Homo sapiens
ccaagtagaatatgc

SEQ ID NO: 167406 - DNA, 15 bp, Homo sapiens
caagtagaatatgcg

SEQ ID NO: 167407 - DNA, 15 bp, Homo sapiens
aagtagaatatgcga

SEQ ID NO: 167408 - DNA, 15 bp, Homo sapiens
agtagaatatgcgat

SEQ ID NO: 167409 - DNA, 15 bp, Homo sapiens
gtagaatatgcgatc

SEQ ID NO: 167410 - DNA, 15 bp, Homo sapiens
tagaatatgcgatca

SEQ ID NO: 167411 - DNA, 15 bp, Homo sapiens
agaatatgcgatcat

SEQ ID NO: 167412 - DNA, 15 bp, Homo sapiens
gaatatgcgatcatt

SEQ ID NO: 167413 - DNA, 15 bp, Homo sapiens
aatatgcgatcattt

SEQ ID NO: 167414 - DNA, 15 bp, Homo sapiens
atatgcgatcatttt

SEQ ID NO: 167415 - DNA, 15 bp, Homo sapiens
tatgcgatcattttg

SEQ ID NO: 167416 - DNA, 15 bp, Homo sapiens
atgcgatcattttgt

SEQ ID NO: 167417 - DNA, 15 bp, Homo sapiens
tgcgatcattttgta

SEQ ID NO: 167418 - DNA, 15 bp, Homo sapiens
gcgatcattttgtaa

SEQ ID NO: 167419 - DNA, 15 bp, Homo sapiens
cgatcattttgtaaa

SEQ ID NO: 167420 - DNA, 15 bp, Homo sapiens
gatcattttgtaaaa

SEQ ID NO: 167421 - DNA, 15 bp, Homo sapiens
atcattttgtaaaaa

SEQ ID NO: 167422 - DNA, 15 bp, Homo sapiens
tcattttgtaaaaat

SEQ ID NO: 167423 - DNA, 15 bp, Homo sapiens
cattttgtaaaaatt

SEQ ID NO: 167424 - DNA, 15 bp, Homo sapiens
attttgtaaaaatta

SEQ ID NO: 167425 - DNA, 15 bp, Homo sapiens
ttttgtaaaaattag

SEQ ID NO: 167426 - DNA, 15 bp, Homo sapiens
tttgtaaaaattaga

SEQ ID NO: 167427 - DNA, 15 bp, Homo sapiens
ttgtaaaaattagaa

SEQ ID NO: 167428 - DNA, 15 bp, Homo sapiens
tgtaaaaattagaaa

SEQ ID NO: 167429 - DNA, 15 bp, Homo sapiens
gtaaaaattagaaaa

SEQ ID NO: 167430 - DNA, 15 bp, Homo sapiens
taaaaattagaaaat

SEQ ID NO: 167431 - DNA, 15 bp, Homo sapiens
aaaaattagaaaata

SEQ ID NO: 167432 - DNA, 15 bp, Homo sapiens
aaaattagaaaatac

SEQ ID NO: 167433 - DNA, 15 bp, Homo sapiens
aaattagaaaataca

SEQ ID NO: 167434 - DNA, 15 bp, Homo sapiens
aattagaaaatacag

SEQ ID NO: 167435 - DNA, 15 bp, Homo sapiens
attagaaaatacaga

SEQ ID NO: 167436 - DNA, 15 bp, Homo sapiens
ttagaaaatacagaa

SEQ ID NO: 167437 - DNA, 15 bp, Homo sapiens
tagaaaatacagaaa

SEQ ID NO: 167438 - DNA, 15 bp, Homo sapiens
agaaaatacagaaaa

SEQ ID NO: 167439 - DNA, 15 bp, Homo sapiens
gaaaatacagaaaag

SEQ ID NO: 167440 - DNA, 15 bp, Homo sapiens
aaaatacagaaaagc

SEQ ID NO: 167441 - DNA, 15 bp, Homo sapiens
aaatacagaaaagca

SEQ ID NO: 167442 - DNA, 15 bp, Homo sapiens
aatacagaaaagcaa

SEQ ID NO: 167443 - DNA, 15 bp, Homo sapiens
atacagaaaagcaaa

SEQ ID NO: 167444 - DNA, 15 bp, Homo sapiens
tacagaaaagcaaag

SEQ ID NO: 167445 - DNA, 15 bp, Homo sapiens
acagaaaagcaaaga

SEQ ID NO: 167446 - DNA, 15 bp, Homo sapiens
cagaaaagcaaagag

SEQ ID NO: 167447 - DNA, 15 bp, Homo sapiens
agaaaagcaaagagt

SEQ ID NO: 167448 - DNA, 15 bp, Homo sapiens
gaaaagcaaagagta

SEQ ID NO: 167449 - DNA, 15 bp, Homo sapiens
aaaagcaaagagtaa

SEQ ID NO: 167450 - DNA, 15 bp, Homo sapiens
aaagcaaagagtaaa

SEQ ID NO: 167451 - DNA, 15 bp, Homo sapiens
aagcaaagagtaaaa

SEQ ID NO: 167452 - DNA, 15 bp, Homo sapiens
agcaaagagtaaaac

SEQ ID NO: 167453 - DNA, 15 bp, Homo sapiens
gcaaagagtaaaaca

SEQ ID NO: 167454 - DNA, 15 bp, Homo sapiens
caaagagtaaaacaa

SEQ ID NO: 167455 - DNA, 15 bp, Homo sapiens
aaagagtaaaacaat

SEQ ID NO: 167456 - DNA, 15 bp, Homo sapiens
aagagtaaaacaatt

SEQ ID NO: 167457 - DNA, 15 bp, Homo sapiens
agagtaaaacaatta

SEQ ID NO: 167458 - DNA, 15 bp, Homo sapiens
gagtaaaacaattat

SEQ ID NO: 167459 - DNA, 15 bp, Homo sapiens
agtaaaacaattatt

SEQ ID NO: 167460 - DNA, 15 bp, Homo sapiens
gtaaaacaattatta

SEQ ID NO: 167461 - DNA, 15 bp, Homo sapiens
taaaacaattattac

SEQ ID NO: 167462 - DNA, 15 bp, Homo sapiens
aaaacaattattacc

SEQ ID NO: 167463 - DNA, 15 bp, Homo sapiens
aaacaattattacct

SEQ ID NO: 167464 - DNA, 15 bp, Homo sapiens
aacaattattacctg

SEQ ID NO: 167465 - DNA, 15 bp, Homo sapiens
acaattattacctga

SEQ ID NO: 167466 - DNA, 15 bp, Homo sapiens
caattattacctgaa

SEQ ID NO: 167467 - DNA, 15 bp, Homo sapiens
aattattacctgaaa

SEQ ID NO: 167468 - DNA, 15 bp, Homo sapiens
attattacctgaaat

SEQ ID NO: 167469 - DNA, 15 bp, Homo sapiens
ttattacctgaaatt

SEQ ID NO: 167470 - DNA, 15 bp, Homo sapiens
tattacctgaaatta

SEQ ID NO: 167471 - DNA, 15 bp, Homo sapiens
attacctgaaattat

SEQ ID NO: 167472 - DNA, 15 bp, Homo sapiens
ttacctgaaattata

SEQ ID NO: 167473 - DNA, 15 bp, Homo sapiens
tacctgaaattatat

SEQ ID NO: 167474 - DNA, 15 bp, Homo sapiens
acctgaaattatata

SEQ ID NO: 167475 - DNA, 15 bp, Homo sapiens
cctgaaattatatat

SEQ ID NO: 167476 - DNA, 15 bp, Homo sapiens
ctgaaattatatatg

SEQ ID NO: 167477 - DNA, 15 bp, Homo sapiens
tgaaattatatatgc

SEQ ID NO: 167478 - DNA, 15 bp, Homo sapiens
gaaattatatatgca

SEQ ID NO: 167479 - DNA, 15 bp, Homo sapiens
aaattatatatgcat

SEQ ID NO: 167480 - DNA, 15 bp, Homo sapiens
aattatatatgcata

SEQ ID NO: 167481 - DNA, 15 bp, Homo sapiens
attatatatgcatat

SEQ ID NO: 167482 - DNA, 15 bp, Homo sapiens
ttatatatgcatatt

SEQ ID NO: 167483 - DNA, 15 bp, Homo sapiens
tatatatgcatattc

SEQ ID NO: 167484 - DNA, 15 bp, Homo sapiens
atatatgcatattct

SEQ ID NO: 167485 - DNA, 15 bp, Homo sapiens
tatatgcatattctt

SEQ ID NO: 167486 - DNA, 15 bp, Homo sapiens
atatgcatattctta

SEQ ID NO: 167487 - DNA, 15 bp, Homo sapiens
tatgcatattcttac

SEQ ID NO: 167488 - DNA, 15 bp, Homo sapiens
atgcatattcttaca

SEQ ID NO: 167489 - DNA, 15 bp, Homo sapiens
tgcatattcttacaa

SEQ ID NO: 167490 - DNA, 15 bp, Homo sapiens
gcatattcttacaaa

SEQ ID NO: 167491 - DNA, 15 bp, Homo sapiens
catattcttacaaaa

SEQ ID NO: 167492 - DNA, 15 bp, Homo sapiens
atattcttacaaaaa

SEQ ID NO: 167493 - DNA, 15 bp, Homo sapiens
tattcttacaaaaat

SEQ ID NO: 167494 - DNA, 15 bp, Homo sapiens
attcttacaaaaatg

SEQ ID NO: 167495 - DNA, 15 bp, Homo sapiens
ttcttacaaaaatgc

SEQ ID NO: 167496 - DNA, 15 bp, Homo sapiens
tcttacaaaaatgca

SEQ ID NO: 167497 - DNA, 15 bp, Homo sapiens
cttacaaaaatgcaa

SEQ ID NO: 167498 - DNA, 15 bp, Homo sapiens
ttacaaaaatgcaag

SEQ ID NO: 167499 - DNA, 15 bp, Homo sapiens
tacaaaaatgcaagc

SEQ ID NO: 167500 - DNA, 15 bp, Homo sapiens
acaaaaatgcaagcc

SEQ ID NO: 167501 - DNA, 15 bp, Homo sapiens
caaaaatgcaagccc

SEQ ID NO: 167502 - DNA, 15 bp, Homo sapiens
aaaaatgcaagccca

SEQ ID NO: 167503 - DNA, 15 bp, Homo sapiens
aaaatgcaagcccag

SEQ ID NO: 167504 - DNA, 15 bp, Homo sapiens
aaatgcaagcccagt

SEQ ID NO: 167505 - DNA, 15 bp, Homo sapiens
aatgcaagcccagta

SEQ ID NO: 167506 - DNA, 15 bp, Homo sapiens
atgcaagcccagtat

SEQ ID NO: 167507 - DNA, 15 bp, Homo sapiens
tgcaagcccagtata

SEQ ID NO: 167508 - DNA, 15 bp, Homo sapiens
gcaagcccagtataa

SEQ ID NO: 167509 - DNA, 15 bp, Homo sapiens
caagcccagtataaa

SEQ ID NO: 167510 - DNA, 15 bp, Homo sapiens
aagcccagtataaat

SEQ ID NO: 167511 - DNA, 15 bp, Homo sapiens
agcccagtataaata

SEQ ID NO: 167512 - DNA, 15 bp, Homo sapiens
gcccagtataaatac

SEQ ID NO: 167513 - DNA, 15 bp, Homo sapiens
cccagtataaatact

SEQ ID NO: 167514 - DNA, 15 bp, Homo sapiens
ccagtataaatactg

SEQ ID NO: 167515 - DNA, 15 bp, Homo sapiens
cagtataaatactgc

SEQ ID NO: 167516 - DNA, 15 bp, Homo sapiens
agtataaatactgct

SEQ ID NO: 167517 - DNA, 15 bp, Homo sapiens
gtataaatactgctc

SEQ ID NO: 167518 - DNA, 15 bp, Homo sapiens
tataaatactgctct

SEQ ID NO: 167519 - DNA, 15 bp, Homo sapiens
ataaatactgctctt

SEQ ID NO: 167520 - DNA, 15 bp, Homo sapiens
taaatactgctcttt

SEQ ID NO: 167521 - DNA, 15 bp, Homo sapiens
aaatactgctctttt

SEQ ID NO: 167522 - DNA, 15 bp, Homo sapiens
aatactgctcttttt

SEQ ID NO: 167523 - DNA, 15 bp, Homo sapiens
atactgctctttttc

SEQ ID NO: 167524 - DNA, 15 bp, Homo sapiens
tactgctctttttca

SEQ ID NO: 167525 - DNA, 15 bp, Homo sapiens
actgctctttttcac

SEQ ID NO: 167526 - DNA, 15 bp, Homo sapiens
ctgctctttttcact

SEQ ID NO: 167527 - DNA, 15 bp, Homo sapiens
tgctctttttcactt

SEQ ID NO: 167528 - DNA, 15 bp, Homo sapiens
gctctttttcactta

SEQ ID NO: 167529 - DNA, 15 bp, Homo sapiens
ctctttttcacttaa

SEQ ID NO: 167530 - DNA, 15 bp, Homo sapiens
tctttttcacttaat

SEQ ID NO: 167531 - DNA, 15 bp, Homo sapiens
ctttttcacttaata

SEQ ID NO: 167532 - DNA, 15 bp, Homo sapiens
ttttcacttaatata

SEQ ID NO: 167533 - DNA, 15 bp, Homo sapiens
tttcacttaatatat

SEQ ID NO: 167534 - DNA, 15 bp, Homo sapiens
ttcacttaatatatt

SEQ ID NO: 167535 - DNA, 15 bp, Homo sapiens
tcacttaatatattg

SEQ ID NO: 167536 - DNA, 15 bp, Homo sapiens
cacttaatatattgt

SEQ ID NO: 167537 - DNA, 15 bp, Homo sapiens
acttaatatattgta

SEQ ID NO: 167538 - DNA, 15 bp, Homo sapiens
cttaatatattgtaa

SEQ ID NO: 167539 - DNA, 15 bp, Homo sapiens
ttaatatattgtaaa

SEQ ID NO: 167540 - DNA, 15 bp, Homo sapiens
taatatattgtaaac

SEQ ID NO: 167541 - DNA, 15 bp, Homo sapiens
aatatattgtaaaca

SEQ ID NO: 167542 - DNA, 15 bp, Homo sapiens
atatattgtaaacat

SEQ ID NO: 167543 - DNA, 15 bp, Homo sapiens
tatattgtaaacatt

SEQ ID NO: 167544 - DNA, 15 bp, Homo sapiens
atattgtaaacatta

SEQ ID NO: 167545 - DNA, 15 bp, Homo sapiens
tattgtaaacattat

SEQ ID NO: 167546 - DNA, 15 bp, Homo sapiens
attgtaaacattatt

SEQ ID NO: 167547 - DNA, 15 bp, Homo sapiens
ttgtaaacattattc

SEQ ID NO: 167548 - DNA, 15 bp, Homo sapiens
tgtaaacattattcc

SEQ ID NO: 167549 - DNA, 15 bp, Homo sapiens
gtaaacattattcca

SEQ ID NO: 167550 - DNA, 15 bp, Homo sapiens
taaacattattccaa

SEQ ID NO: 167551 - DNA, 15 bp, Homo sapiens
aaacattattccaag

SEQ ID NO: 167552 - DNA, 15 bp, Homo sapiens
aacattattccaagt

SEQ ID NO: 167553 - DNA, 15 bp, Homo sapiens
acattattccaagtc

SEQ ID NO: 167554 - DNA, 15 bp, Homo sapiens
cattattccaagtca

SEQ ID NO: 167555 - DNA, 15 bp, Homo sapiens
attattccaagtcag

SEQ ID NO: 167556 - DNA, 15 bp, Homo sapiens
ttattccaagtcagt

SEQ ID NO: 167557 - DNA, 15 bp, Homo sapiens
tattccaagtcagtg

SEQ ID NO: 167558 - DNA, 15 bp, Homo sapiens
attccaagtcagtgc

SEQ ID NO: 167559 - DNA, 15 bp, Homo sapiens
ttccaagtcagtgca

SEQ ID NO: 167560 - DNA, 15 bp, Homo sapiens
tccaagtcagtgcat

SEQ ID NO: 167561 - DNA, 15 bp, Homo sapiens
ccaagtcagtgcatt

SEQ ID NO: 167562 - DNA, 15 bp, Homo sapiens
caagtcagtgcattt

SEQ ID NO: 167563 - DNA, 15 bp, Homo sapiens
aagtcagtgcattta

SEQ ID NO: 167564 - DNA, 15 bp, Homo sapiens
agtcagtgcatttag

SEQ ID NO: 167565 - DNA, 15 bp, Homo sapiens
gtcagtgcatttagg

SEQ ID NO: 167566 - DNA, 15 bp, Homo sapiens
tcagtgcatttaggt

SEQ ID NO: 167567 - DNA, 15 bp, Homo sapiens
cagtgcatttaggtg

SEQ ID NO: 167568 - DNA, 15 bp, Homo sapiens
agtgcatttaggtgt

SEQ ID NO: 167569 - DNA, 15 bp, Homo sapiens
gtgcatttaggtgtc

SEQ ID NO: 167570 - DNA, 15 bp, Homo sapiens
tgcatttaggtgtca

SEQ ID NO: 167571 - DNA, 15 bp, Homo sapiens
gcatttaggtgtcat

SEQ ID NO: 167572 - DNA, 15 bp, Homo sapiens
catttaggtgtcatt

SEQ ID NO: 167573 - DNA, 15 bp, Homo sapiens
atttaggtgtcattt

SEQ ID NO: 167574 - DNA, 15 bp, Homo sapiens
tttaggtgtcatttc

SEQ ID NO: 167575 - DNA, 15 bp, Homo sapiens
ttaggtgtcatttct

SEQ ID NO: 167576 - DNA, 15 bp, Homo sapiens
taggtgtcatttctt

SEQ ID NO: 167577 - DNA, 15 bp, Homo sapiens
aggtgtcatttctta

SEQ ID NO: 167578 - DNA, 15 bp, Homo sapiens
ggtgtcatttcttat

SEQ ID NO: 167579 - DNA, 15 bp, Homo sapiens
gtgtcatttcttata

SEQ ID NO: 167580 - DNA, 15 bp, Homo sapiens
tgtcatttcttatag

SEQ ID NO: 167581 - DNA, 15 bp, Homo sapiens
gtcatttcttatagc

SEQ ID NO: 167582 - DNA, 15 bp, Homo sapiens
tcatttcttatagct

SEQ ID NO: 167583 - DNA, 15 bp, Homo sapiens
catttcttatagctg

SEQ ID NO: 167584 - DNA, 15 bp, Homo sapiens
atttcttatagctgg

SEQ ID NO: 167585 - DNA, 15 bp, Homo sapiens
tttcttatagctgga

SEQ ID NO: 167586 - DNA, 15 bp, Homo sapiens
ttcttatagctggat

SEQ ID NO: 167587 - DNA, 15 bp, Homo sapiens
tcttatagctggata

SEQ ID NO: 167588 - DNA, 15 bp, Homo sapiens
cttatagctggatag

SEQ ID NO: 167589 - DNA, 15 bp, Homo sapiens
ttatagctggatagt

SEQ ID NO: 167590 - DNA, 15 bp, Homo sapiens
tatagctggatagta

SEQ ID NO: 167591 - DNA, 15 bp, Homo sapiens
atagctggatagtat

SEQ ID NO: 167592 - DNA, 15 bp, Homo sapiens
tagctggatagtatt

SEQ ID NO: 167593 - DNA, 15 bp, Homo sapiens
agctggatagtattc

SEQ ID NO: 167594 - DNA, 15 bp, Homo sapiens
gctggatagtattcc

SEQ ID NO: 167595 - DNA, 15 bp, Homo sapiens
ctggatagtattcca

SEQ ID NO: 167596 - DNA, 15 bp, Homo sapiens
tggatagtattccat

SEQ ID NO: 167597 - DNA, 15 bp, Homo sapiens
ggatagtattccatt

SEQ ID NO: 167598 - DNA, 15 bp, Homo sapiens
gatagtattccatta

SEQ ID NO: 167599 - DNA, 15 bp, Homo sapiens
atagtattccattag

SEQ ID NO: 167600 - DNA, 15 bp, Homo sapiens
tagtattccattagg

SEQ ID NO: 167601 - DNA, 15 bp, Homo sapiens
agtattccattagga

SEQ ID NO: 167602 - DNA, 15 bp, Homo sapiens
gtattccattaggat

SEQ ID NO: 167603 - DNA, 15 bp, Homo sapiens
tattccattaggata

SEQ ID NO: 167604 - DNA, 15 bp, Homo sapiens
attccattaggatat

SEQ ID NO: 167605 - DNA, 15 bp, Homo sapiens
ttccattaggatata

SEQ ID NO: 167606 - DNA, 15 bp, Homo sapiens
tccattaggatatac

SEQ ID NO: 167607 - DNA, 15 bp, Homo sapiens
ccattaggatatact

SEQ ID NO: 167608 - DNA, 15 bp, Homo sapiens
cattaggatatactc

SEQ ID NO: 167609 - DNA, 15 bp, Homo sapiens
attaggatatactct

SEQ ID NO: 167610 - DNA, 15 bp, Homo sapiens
ttaggatatactctt

SEQ ID NO: 167611 - DNA, 15 bp, Homo sapiens
taggatatactctta

SEQ ID NO: 167612 - DNA, 15 bp, Homo sapiens
aggatatactcttat

SEQ ID NO: 167613 - DNA, 15 bp, Homo sapiens
ggatatactcttatt

SEQ ID NO: 167614 - DNA, 15 bp, Homo sapiens
gatatactcttattt

SEQ ID NO: 167615 - DNA, 15 bp, Homo sapiens
atatactcttattta

SEQ ID NO: 167616 - DNA, 15 bp, Homo sapiens
tatactcttatttaa

SEQ ID NO: 167617 - DNA, 15 bp, Homo sapiens
atactcttatttaac

SEQ ID NO: 167618 - DNA, 15 bp, Homo sapiens
tactcttatttaact

SEQ ID NO: 167619 - DNA, 15 bp, Homo sapiens
actcttatttaacta

SEQ ID NO: 167620 - DNA, 15 bp, Homo sapiens
ctcttatttaactat

SEQ ID NO: 167621 - DNA, 15 bp, Homo sapiens
tcttatttaactatt

SEQ ID NO: 167622 - DNA, 15 bp, Homo sapiens
cttatttaactattc

SEQ ID NO: 167623 - DNA, 15 bp, Homo sapiens
ttatttaactattcc

SEQ ID NO: 167624 - DNA, 15 bp, Homo sapiens
tatttaactattccc

SEQ ID NO: 167625 - DNA, 15 bp, Homo sapiens
atttaactattcccc

SEQ ID NO: 167626 - DNA, 15 bp, Homo sapiens
tttaactattccccc

SEQ ID NO: 167627 - DNA, 15 bp, Homo sapiens
ttaactattccccct

SEQ ID NO: 167628 - DNA, 15 bp, Homo sapiens
taactattccccctt

SEQ ID NO: 167629 - DNA, 15 bp, Homo sapiens
aactattcccccttt

SEQ ID NO: 167630 - DNA, 15 bp, Homo sapiens
actattccccctttt

SEQ ID NO: 167631 - DNA, 15 bp, Homo sapiens
ctattcccccttttg

SEQ ID NO: 167632 - DNA, 15 bp, Homo sapiens
tattcccccttttgt

SEQ ID NO: 167633 - DNA, 15 bp, Homo sapiens
attcccccttttgta

SEQ ID NO: 167634 - DNA, 15 bp, Homo sapiens
ttcccccttttgtag

SEQ ID NO: 167635 - DNA, 15 bp, Homo sapiens
tcccccttttgtaga

SEQ ID NO: 167636 - DNA, 15 bp, Homo sapiens
cccccttttgtagac

SEQ ID NO: 167637 - DNA, 15 bp, Homo sapiens
ccccttttgtagaca

SEQ ID NO: 167638 - DNA, 15 bp, Homo sapiens
cccttttgtagacat

SEQ ID NO: 167639 - DNA, 15 bp, Homo sapiens
ccttttgtagacatt

SEQ ID NO: 167640 - DNA, 15 bp, Homo sapiens
cttttgtagacattt

SEQ ID NO: 167641 - DNA, 15 bp, Homo sapiens
ttttgtagacatttg

SEQ ID NO: 167642 - DNA, 15 bp, Homo sapiens
tttgtagacatttgg

SEQ ID NO: 167643 - DNA, 15 bp, Homo sapiens
ttgtagacatttgga

SEQ ID NO: 167644 - DNA, 15 bp, Homo sapiens
tgtagacatttggat

SEQ ID NO: 167645 - DNA, 15 bp, Homo sapiens
gtagacatttggatt

SEQ ID NO: 167646 - DNA, 15 bp, Homo sapiens
tagacatttggatta

SEQ ID NO: 167647 - DNA, 15 bp, Homo sapiens
agacatttggattat

SEQ ID NO: 167648 - DNA, 15 bp, Homo sapiens
gacatttggattatt

SEQ ID NO: 167649 - DNA, 15 bp, Homo sapiens
acatttggattattt

SEQ ID NO: 167650 - DNA, 15 bp, Homo sapiens
catttggattatttc

SEQ ID NO: 167651 - DNA, 15 bp, Homo sapiens
atttggattatttcc

SEQ ID NO: 167652 - DNA, 15 bp, Homo sapiens
tttggattatttcca

SEQ ID NO: 167653 - DNA, 15 bp, Homo sapiens
ttggattatttccaa

SEQ ID NO: 167654 - DNA, 15 bp, Homo sapiens
tggattatttccaac

SEQ ID NO: 167655 - DNA, 15 bp, Homo sapiens
ggattatttccaact

SEQ ID NO: 167656 - DNA, 15 bp, Homo sapiens
gattatttccaactt

SEQ ID NO: 167657 - DNA, 15 bp, Homo sapiens
attatttccaacttg

SEQ ID NO: 167658 - DNA, 15 bp, Homo sapiens
ttatttccaacttgt

SEQ ID NO: 167659 - DNA, 15 bp, Homo sapiens
tatttccaacttgtt

SEQ ID NO: 167660 - DNA, 15 bp, Homo sapiens
atttccaacttgttc

SEQ ID NO: 167661 - DNA, 15 bp, Homo sapiens
tttccaacttgttca

SEQ ID NO: 167662 - DNA, 15 bp, Homo sapiens
ttccaacttgttcac

SEQ ID NO: 167663 - DNA, 15 bp, Homo sapiens
tccaacttgttcaca

SEQ ID NO: 167664 - DNA, 15 bp, Homo sapiens
ccaacttgttcacaa

SEQ ID NO: 167665 - DNA, 15 bp, Homo sapiens
caacttgttcacaat

SEQ ID NO: 167666 - DNA, 15 bp, Homo sapiens
aacttgttcacaatt

SEQ ID NO: 167667 - DNA, 15 bp, Homo sapiens
acttgttcacaattg

SEQ ID NO: 167668 - DNA, 15 bp, Homo sapiens
cttgttcacaattgt

SEQ ID NO: 167669 - DNA, 15 bp, Homo sapiens
ttgttcacaattgta

SEQ ID NO: 167670 - DNA, 15 bp, Homo sapiens
tgttcacaattgtaa

SEQ ID NO: 167671 - DNA, 15 bp, Homo sapiens
gttcacaattgtaaa

SEQ ID NO: 167672 - DNA, 15 bp, Homo sapiens
ttcacaattgtaaac

SEQ ID NO: 167673 - DNA, 15 bp, Homo sapiens
tcacaattgtaaaca

SEQ ID NO: 167674 - DNA, 15 bp, Homo sapiens
cacaattgtaaacac

SEQ ID NO: 167675 - DNA, 15 bp, Homo sapiens
acaattgtaaacacc

SEQ ID NO: 167676 - DNA, 15 bp, Homo sapiens
caattgtaaacacca

SEQ ID NO: 167677 - DNA, 15 bp, Homo sapiens
aattgtaaacaccac

SEQ ID NO: 167678 - DNA, 15 bp, Homo sapiens
attgtaaacaccact

SEQ ID NO: 167679 - DNA, 15 bp, Homo sapiens
ttgtaaacaccacta

SEQ ID NO: 167680 - DNA, 15 bp, Homo sapiens
tgtaaacaccactac

SEQ ID NO: 167681 - DNA, 15 bp, Homo sapiens
gtaaacaccactaca

SEQ ID NO: 167682 - DNA, 15 bp, Homo sapiens
taaacaccactacac

SEQ ID NO: 167683 - DNA, 15 bp, Homo sapiens
aaacaccactacact

SEQ ID NO: 167684 - DNA, 15 bp, Homo sapiens
aacaccactacactg

SEQ ID NO: 167685 - DNA, 15 bp, Homo sapiens
acaccactacactga

SEQ ID NO: 167686 - DNA, 15 bp, Homo sapiens
caccactacactgaa

SEQ ID NO: 167687 - DNA, 15 bp, Homo sapiens
accactacactgaac

SEQ ID NO: 167688 - DNA, 15 bp, Homo sapiens
ccactacactgaaca

SEQ ID NO: 167689 - DNA, 15 bp, Homo sapiens
cactacactgaacag

SEQ ID NO: 167690 - DNA, 15 bp, Homo sapiens
actacactgaacagc

SEQ ID NO: 167691 - DNA, 15 bp, Homo sapiens
ctacactgaacagca

SEQ ID NO: 167692 - DNA, 15 bp, Homo sapiens
tacactgaacagcat

SEQ ID NO: 167693 - DNA, 15 bp, Homo sapiens
acactgaacagcatc

SEQ ID NO: 167694 - DNA, 15 bp, Homo sapiens
cactgaacagcatca

SEQ ID NO: 167695 - DNA, 15 bp, Homo sapiens
actgaacagcatcat

SEQ ID NO: 167696 - DNA, 15 bp, Homo sapiens
ctgaacagcatcatc

SEQ ID NO: 167697 - DNA, 15 bp, Homo sapiens
tgaacagcatcatcc

SEQ ID NO: 167698 - DNA, 15 bp, Homo sapiens
gaacagcatcatccc

SEQ ID NO: 167699 - DNA, 15 bp, Homo sapiens
aacagcatcatccct

SEQ ID NO: 167700 - DNA, 15 bp, Homo sapiens
acagcatcatcccta

SEQ ID NO: 167701 - DNA, 15 bp, Homo sapiens
cagcatcatccctat

SEQ ID NO: 167702 - DNA, 15 bp, Homo sapiens
agcatcatccctata

SEQ ID NO: 167703 - DNA, 15 bp, Homo sapiens
gcatcatccctatat

SEQ ID NO: 167704 - DNA, 15 bp, Homo sapiens
catcatccctatatc

SEQ ID NO: 167705 - DNA, 15 bp, Homo sapiens
atcatccctatatcc

SEQ ID NO: 167706 - DNA, 15 bp, Homo sapiens
tcatccctatatcca

SEQ ID NO: 167707 - DNA, 15 bp, Homo sapiens
catccctatatccac

SEQ ID NO: 167708 - DNA, 15 bp, Homo sapiens
atccctatatccaca

SEQ ID NO: 167709 - DNA, 15 bp, Homo sapiens
tccctatatccacat

SEQ ID NO: 167710 - DNA, 15 bp, Homo sapiens
ccctatatccacatg

SEQ ID NO: 167711 - DNA, 15 bp, Homo sapiens
cctatatccacatgt

SEQ ID NO: 167712 - DNA, 15 bp, Homo sapiens
ctatatccacatgta

SEQ ID NO: 167713 - DNA, 15 bp, Homo sapiens
tatatccacatgtac

SEQ ID NO: 167714 - DNA, 15 bp, Homo sapiens
atatccacatgtact

SEQ ID NO: 167715 - DNA, 15 bp, Homo sapiens
tatccacatgtactt

SEQ ID NO: 167716 - DNA, 15 bp, Homo sapiens
atccacatgtacttg

SEQ ID NO: 167717 - DNA, 15 bp, Homo sapiens
tccacatgtacttgt

SEQ ID NO: 167718 - DNA, 15 bp, Homo sapiens
ccacatgtacttgta

SEQ ID NO: 167719 - DNA, 15 bp, Homo sapiens
cacatgtacttgtaa

SEQ ID NO: 167720 - DNA, 15 bp, Homo sapiens
acatgtacttgtaac

SEQ ID NO: 167721 - DNA, 15 bp, Homo sapiens
catgtacttgtaaca

SEQ ID NO: 167722 - DNA, 15 bp, Homo sapiens
atgtacttgtaacag

SEQ ID NO: 167723 - DNA, 15 bp, Homo sapiens
tgtacttgtaacaga

SEQ ID NO: 167724 - DNA, 15 bp, Homo sapiens
gtacttgtaacagaa

SEQ ID NO: 167725 - DNA, 15 bp, Homo sapiens
tacttgtaacagaat

SEQ ID NO: 167726 - DNA, 15 bp, Homo sapiens
acttgtaacagaata

SEQ ID NO: 167727 - DNA, 15 bp, Homo sapiens
cttgtaacagaatac

SEQ ID NO: 167728 - DNA, 15 bp, Homo sapiens
ttgtaacagaataca

SEQ ID NO: 167729 - DNA, 15 bp, Homo sapiens
tgtaacagaatacaa

SEQ ID NO: 167730 - DNA, 15 bp, Homo sapiens
gtaacagaatacaat

SEQ ID NO: 167731 - DNA, 15 bp, Homo sapiens
taacagaatacaatt

SEQ ID NO: 167732 - DNA, 15 bp, Homo sapiens
aacagaatacaattc

SEQ ID NO: 167733 - DNA, 15 bp, Homo sapiens
acagaatacaattcc

SEQ ID NO: 167734 - DNA, 15 bp, Homo sapiens
cagaatacaattccc

SEQ ID NO: 167735 - DNA, 15 bp, Homo sapiens
agaatacaattccct

SEQ ID NO: 167736 - DNA, 15 bp, Homo sapiens
gaatacaattcccta

SEQ ID NO: 167737 - DNA, 15 bp, Homo sapiens
aatacaattccctag

SEQ ID NO: 167738 - DNA, 15 bp, Homo sapiens
atacaattccctagg

SEQ ID NO: 167739 - DNA, 15 bp, Homo sapiens
tacaattccctagga

SEQ ID NO: 167740 - DNA, 15 bp, Homo sapiens
acaattccctaggaa

SEQ ID NO: 167741 - DNA, 15 bp, Homo sapiens
caattccctaggaag

SEQ ID NO: 167742 - DNA, 15 bp, Homo sapiens
aattccctaggaagc

SEQ ID NO: 167743 - DNA, 15 bp, Homo sapiens
attccctaggaagct

SEQ ID NO: 167744 - DNA, 15 bp, Homo sapiens
ttccctaggaagctg

SEQ ID NO: 167745 - DNA, 15 bp, Homo sapiens
tccctaggaagctgg

SEQ ID NO: 167746 - DNA, 15 bp, Homo sapiens
ccctaggaagctgga

SEQ ID NO: 167747 - DNA, 15 bp, Homo sapiens
cctaggaagctggaa

SEQ ID NO: 167748 - DNA, 15 bp, Homo sapiens
ctaggaagctggaat

SEQ ID NO: 167749 - DNA, 15 bp, Homo sapiens
taggaagctggaatg

SEQ ID NO: 167750 - DNA, 15 bp, Homo sapiens
aggaagctggaatgc

SEQ ID NO: 167751 - DNA, 15 bp, Homo sapiens
ggaagctggaatgct

SEQ ID NO: 167752 - DNA, 15 bp, Homo sapiens
gaagctggaatgctg

SEQ ID NO: 167753 - DNA, 15 bp, Homo sapiens
aagctggaatgctgg

SEQ ID NO: 167754 - DNA, 15 bp, Homo sapiens
agctggaatgctgga

SEQ ID NO: 167755 - DNA, 15 bp, Homo sapiens
gctggaatgctggaa

SEQ ID NO: 167756 - DNA, 15 bp, Homo sapiens
ctggaatgctggaag

SEQ ID NO: 167757 - DNA, 15 bp, Homo sapiens
tggaatgctggaagt

SEQ ID NO: 167758 - DNA, 15 bp, Homo sapiens
ggaatgctggaagtc

SEQ ID NO: 167759 - DNA, 15 bp, Homo sapiens
gaatgctggaagtca

SEQ ID NO: 167760 - DNA, 15 bp, Homo sapiens
aatgctggaagtcat

SEQ ID NO: 167761 - DNA, 15 bp, Homo sapiens
atgctggaagtcatg

SEQ ID NO: 167762 - DNA, 15 bp, Homo sapiens
tgctggaagtcatgg

SEQ ID NO: 167763 - DNA, 15 bp, Homo sapiens
gctggaagtcatggt

SEQ ID NO: 167764 - DNA, 15 bp, Homo sapiens
ctggaagtcatggtg

SEQ ID NO: 167765 - DNA, 15 bp, Homo sapiens
tggaagtcatggtga

SEQ ID NO: 167766 - DNA, 15 bp, Homo sapiens
ggaagtcatggtgat

SEQ ID NO: 167767 - DNA, 15 bp, Homo sapiens
gaagtcatggtgatg

SEQ ID NO: 167768 - DNA, 15 bp, Homo sapiens
aagtcatggtgatgt

SEQ ID NO: 167769 - DNA, 15 bp, Homo sapiens
agtcatggtgatgtt

SEQ ID NO: 167770 - DNA, 15 bp, Homo sapiens
gtcatggtgatgttc

SEQ ID NO: 167771 - DNA, 15 bp, Homo sapiens
tcatggtgatgttct

SEQ ID NO: 167772 - DNA, 15 bp, Homo sapiens
catggtgatgttctc

SEQ ID NO: 167773 - DNA, 15 bp, Homo sapiens
atggtgatgttctca

SEQ ID NO: 167774 - DNA, 15 bp, Homo sapiens
tggtgatgttctcat

SEQ ID NO: 167775 - DNA, 15 bp, Homo sapiens
ggtgatgttctcatg

SEQ ID NO: 167776 - DNA, 15 bp, Homo sapiens
gtgatgttctcatgg

SEQ ID NO: 167777 - DNA, 15 bp, Homo sapiens
tgatgttctcatggt

SEQ ID NO: 167778 - DNA, 15 bp, Homo sapiens
gatgttctcatggtt

SEQ ID NO: 167779 - DNA, 15 bp, Homo sapiens
atgttctcatggtta

SEQ ID NO: 167780 - DNA, 15 bp, Homo sapiens
tgttctcatggttac

SEQ ID NO: 167781 - DNA, 15 bp, Homo sapiens
gttctcatggttaca

SEQ ID NO: 167782 - DNA, 15 bp, Homo sapiens
ttctcatggttacag

SEQ ID NO: 167783 - DNA, 15 bp, Homo sapiens
tctcatggttacaga

SEQ ID NO: 167784 - DNA, 15 bp, Homo sapiens
ctcatggttacagag

SEQ ID NO: 167785 - DNA, 15 bp, Homo sapiens
tcatggttacagaga

SEQ ID NO: 167786 - DNA, 15 bp, Homo sapiens
catggttacagagaa

SEQ ID NO: 167787 - DNA, 15 bp, Homo sapiens
atggttacagagaat

SEQ ID NO: 167788 - DNA, 15 bp, Homo sapiens
tggttacagagaatc

SEQ ID NO: 167789 - DNA, 15 bp, Homo sapiens
ggttacagagaatct

SEQ ID NO: 167790 - DNA, 15 bp, Homo sapiens
gttacagagaatctc

SEQ ID NO: 167791 - DNA, 15 bp, Homo sapiens
ttacagagaatctct

SEQ ID NO: 167792 - DNA, 15 bp, Homo sapiens
tacagagaatctctc

SEQ ID NO: 167793 - DNA, 15 bp, Homo sapiens
acagagaatctctct

SEQ ID NO: 167794 - DNA, 15 bp, Homo sapiens
cagagaatctctcta

SEQ ID NO: 167795 - DNA, 15 bp, Homo sapiens
agagaatctctctaa

SEQ ID NO: 167796 - DNA, 15 bp, Homo sapiens
gagaatctctctaaa

SEQ ID NO: 167797 - DNA, 15 bp, Homo sapiens
agaatctctctaaaa

SEQ ID NO: 167798 - DNA, 15 bp, Homo sapiens
gaatctctctaaaac

SEQ ID NO: 167799 - DNA, 15 bp, Homo sapiens
aatctctctaaaact

SEQ ID NO: 167800 - DNA, 15 bp, Homo sapiens
atctctctaaaacta

SEQ ID NO: 167801 - DNA, 15 bp, Homo sapiens
tctctctaaaactaa

SEQ ID NO: 167802 - DNA, 15 bp, Homo sapiens
ctctctaaaactaaa

SEQ ID NO: 167803 - DNA, 15 bp, Homo sapiens
tctctaaaactaaaa

SEQ ID NO: 167804 - DNA, 15 bp, Homo sapiens
ctctaaaactaaaac

SEQ ID NO: 167805 - DNA, 15 bp, Homo sapiens
tctaaaactaaaacc

SEQ ID NO: 167806 - DNA, 15 bp, Homo sapiens
ctaaaactaaaacct

SEQ ID NO: 167807 - DNA, 15 bp, Homo sapiens
taaaactaaaacctc

SEQ ID NO: 167808 - DNA, 15 bp, Homo sapiens
aaaactaaaacctct

SEQ ID NO: 167809 - DNA, 15 bp, Homo sapiens
aaactaaaacctctt

SEQ ID NO: 167810 - DNA, 15 bp, Homo sapiens
aactaaaacctcttt

SEQ ID NO: 167811 - DNA, 15 bp, Homo sapiens
actaaaacctctttc

SEQ ID NO: 167812 - DNA, 15 bp, Homo sapiens
ctaaaacctctttct

SEQ ID NO: 167813 - DNA, 15 bp, Homo sapiens
taaaacctctttctg

SEQ ID NO: 167814 - DNA, 15 bp, Homo sapiens
aaaacctctttctgt

SEQ ID NO: 167815 - DNA, 15 bp, Homo sapiens
aaacctctttctgtt

SEQ ID NO: 167816 - DNA, 15 bp, Homo sapiens
aacctctttctgttt

SEQ ID NO: 167817 - DNA, 15 bp, Homo sapiens
acctctttctgtttt

SEQ ID NO: 167818 - DNA, 15 bp, Homo sapiens
cctctttctgtttta

SEQ ID NO: 167819 - DNA, 15 bp, Homo sapiens
ctctttctgttttac

SEQ ID NO: 167820 - DNA, 15 bp, Homo sapiens
tctttctgttttacc

SEQ ID NO: 167821 - DNA, 15 bp, Homo sapiens
ctttctgttttaccg

SEQ ID NO: 167822 - DNA, 15 bp, Homo sapiens
tttctgttttaccgc

SEQ ID NO: 167823 - DNA, 15 bp, Homo sapiens
ttctgttttaccgca

SEQ ID NO: 167824 - DNA, 15 bp, Homo sapiens
tctgttttaccgcag

SEQ ID NO: 167825 - DNA, 15 bp, Homo sapiens
ctgttttaccgcagt

SEQ ID NO: 167826 - DNA, 15 bp, Homo sapiens
tgttttaccgcagta

SEQ ID NO: 167827 - DNA, 15 bp, Homo sapiens
gttttaccgcagtat

SEQ ID NO: 167828 - DNA, 15 bp, Homo sapiens
ttttaccgcagtatg

SEQ ID NO: 167829 - DNA, 15 bp, Homo sapiens
tttaccgcagtatgg

SEQ ID NO: 167830 - DNA, 15 bp, Homo sapiens
ttaccgcagtatgga

SEQ ID NO: 167831 - DNA, 15 bp, Homo sapiens
taccgcagtatggaa

SEQ ID NO: 167832 - DNA, 15 bp, Homo sapiens
accgcagtatggaag

SEQ ID NO: 167833 - DNA, 15 bp, Homo sapiens
ccgcagtatggaaga

SEQ ID NO: 167834 - DNA, 15 bp, Homo sapiens
cgcagtatggaagaa

SEQ ID NO: 167835 - DNA, 15 bp, Homo sapiens
gcagtatggaagaat

SEQ ID NO: 167836 - DNA, 15 bp, Homo sapiens
cagtatggaagaatg

SEQ ID NO: 167837 - DNA, 15 bp, Homo sapiens
agtatggaagaatgt

SEQ ID NO: 167838 - DNA, 15 bp, Homo sapiens
gtatggaagaatgtg

SEQ ID NO: 167839 - DNA, 15 bp, Homo sapiens
tatggaagaatgtga

SEQ ID NO: 167840 - DNA, 15 bp, Homo sapiens
atggaagaatgtgaa

SEQ ID NO: 167841 - DNA, 15 bp, Homo sapiens
tggaagaatgtgaag

SEQ ID NO: 167842 - DNA, 15 bp, Homo sapiens
ggaagaatgtgaagc

SEQ ID NO: 167843 - DNA, 15 bp, Homo sapiens
gaagaatgtgaagct

SEQ ID NO: 167844 - DNA, 15 bp, Homo sapiens
aagaatgtgaagctc

SEQ ID NO: 167845 - DNA, 15 bp, Homo sapiens
agaatgtgaagctct

SEQ ID NO: 167846 - DNA, 15 bp, Homo sapiens
gaatgtgaagctctt

SEQ ID NO: 167847 - DNA, 15 bp, Homo sapiens
aatgtgaagctcttt

SEQ ID NO: 167848 - DNA, 15 bp, Homo sapiens
atgtgaagctctttg

SEQ ID NO: 167849 - DNA, 15 bp, Homo sapiens
tgtgaagctctttgc

SEQ ID NO: 167850 - DNA, 15 bp, Homo sapiens
gtgaagctctttgca

SEQ ID NO: 167851 - DNA, 15 bp, Homo sapiens
tgaagctctttgcac

SEQ ID NO: 167852 - DNA, 15 bp, Homo sapiens
gaagctctttgcact

SEQ ID NO: 167853 - DNA, 15 bp, Homo sapiens
aagctctttgcacta

SEQ ID NO: 167854 - DNA, 15 bp, Homo sapiens
agctctttgcactag

SEQ ID NO: 167855 - DNA, 15 bp, Homo sapiens
gctctttgcactagg

SEQ ID NO: 167856 - DNA, 15 bp, Homo sapiens
ctctttgcactagga

SEQ ID NO: 167857 - DNA, 15 bp, Homo sapiens
tctttgcactaggat

SEQ ID NO: 167858 - DNA, 15 bp, Homo sapiens
ctttgcactaggatg

SEQ ID NO: 167859 - DNA, 15 bp, Homo sapiens
tttgcactaggatgg

SEQ ID NO: 167860 - DNA, 15 bp, Homo sapiens
ttgcactaggatggc

SEQ ID NO: 167861 - DNA, 15 bp, Homo sapiens
tgcactaggatggca

SEQ ID NO: 167862 - DNA, 15 bp, Homo sapiens
gcactaggatggcaa

SEQ ID NO: 167863 - DNA, 15 bp, Homo sapiens
cactaggatggcaat

SEQ ID NO: 167864 - DNA, 15 bp, Homo sapiens
actaggatggcaatc

SEQ ID NO: 167865 - DNA, 15 bp, Homo sapiens
ctaggatggcaatca

SEQ ID NO: 167866 - DNA, 15 bp, Homo sapiens
taggatggcaatcat

SEQ ID NO: 167867 - DNA, 15 bp, Homo sapiens
aggatggcaatcatg

SEQ ID NO: 167868 - DNA, 15 bp, Homo sapiens
ggatggcaatcatgg

SEQ ID NO: 167869 - DNA, 15 bp, Homo sapiens
gatggcaatcatggt

SEQ ID NO: 167870 - DNA, 15 bp, Homo sapiens
atggcaatcatggtc

SEQ ID NO: 167871 - DNA, 15 bp, Homo sapiens
tggcaatcatggtca

SEQ ID NO: 167872 - DNA, 15 bp, Homo sapiens
ggcaatcatggtcaa

SEQ ID NO: 167873 - DNA, 15 bp, Homo sapiens
gcaatcatggtcaat

SEQ ID NO: 167874 - DNA, 15 bp, Homo sapiens
caatcatggtcaatg

SEQ ID NO: 167875 - DNA, 15 bp, Homo sapiens
aatcatggtcaatgg

SEQ ID NO: 167876 - DNA, 15 bp, Homo sapiens
atcatggtcaatgga

SEQ ID NO: 167877 - DNA, 15 bp, Homo sapiens
tcatggtcaatggaa

SEQ ID NO: 167878 - DNA, 15 bp, Homo sapiens
catggtcaatggaag

SEQ ID NO: 167879 - DNA, 15 bp, Homo sapiens
atggtcaatggaagg

SEQ ID NO: 167880 - DNA, 15 bp, Homo sapiens
tggtcaatggaaggt

SEQ ID NO: 167881 - DNA, 15 bp, Homo sapiens
ggtcaatggaaggtt

SEQ ID NO: 167882 - DNA, 15 bp, Homo sapiens
gtcaatggaaggttc

SEQ ID NO: 167883 - DNA, 15 bp, Homo sapiens
tcaatggaaggttca

SEQ ID NO: 167884 - DNA, 15 bp, Homo sapiens
caatggaaggttcag

SEQ ID NO: 167885 - DNA, 15 bp, Homo sapiens
aatggaaggttcagg

SEQ ID NO: 167886 - DNA, 15 bp, Homo sapiens
atggaaggttcaggt

SEQ ID NO: 167887 - DNA, 15 bp, Homo sapiens
tggaaggttcaggtg

SEQ ID NO: 167888 - DNA, 15 bp, Homo sapiens
ggaaggttcaggtgc

SEQ ID NO: 167889 - DNA, 15 bp, Homo sapiens
gaaggttcaggtgcc

SEQ ID NO: 167890 - DNA, 15 bp, Homo sapiens
aaggttcaggtgcct

SEQ ID NO: 167891 - DNA, 15 bp, Homo sapiens
aggttcaggtgcctt

SEQ ID NO: 167892 - DNA, 15 bp, Homo sapiens
ggttcaggtgccttg

SEQ ID NO: 167893 - DNA, 15 bp, Homo sapiens
gttcaggtgccttgg

SEQ ID NO: 167894 - DNA, 15 bp, Homo sapiens
ttcaggtgccttggc

SEQ ID NO: 167895 - DNA, 15 bp, Homo sapiens
tcaggtgccttggca

SEQ ID NO: 167896 - DNA, 15 bp, Homo sapiens
caggtgccttggcag

SEQ ID NO: 167897 - DNA, 15 bp, Homo sapiens
aggtgccttggcagt

SEQ ID NO: 167898 - DNA, 15 bp, Homo sapiens
ggtgccttggcagtg

SEQ ID NO: 167899 - DNA, 15 bp, Homo sapiens
gtgccttggcagtgt

SEQ ID NO: 167900 - DNA, 15 bp, Homo sapiens
tgccttggcagtgtc

SEQ ID NO: 167901 - DNA, 15 bp, Homo sapiens
gccttggcagtgtcc

SEQ ID NO: 167902 - DNA, 15 bp, Homo sapiens
ccttggcagtgtcca

SEQ ID NO: 167903 - DNA, 15 bp, Homo sapiens
cttggcagtgtccag

SEQ ID NO: 167904 - DNA, 15 bp, Homo sapiens
ttggcagtgtccagc

SEQ ID NO: 167905 - DNA, 15 bp, Homo sapiens
tggcagtgtccagca

SEQ ID NO: 167906 - DNA, 15 bp, Homo sapiens
ggcagtgtccagcat

SEQ ID NO: 167907 - DNA, 15 bp, Homo sapiens
gcagtgtccagcatc

SEQ ID NO: 167908 - DNA, 15 bp, Homo sapiens
cagtgtccagcatct

SEQ ID NO: 167909 - DNA, 15 bp, Homo sapiens
agtgtccagcatcta

SEQ ID NO: 167910 - DNA, 15 bp, Homo sapiens
gtgtccagcatctaa

SEQ ID NO: 167911 - DNA, 15 bp, Homo sapiens
tgtccagcatctaaa

SEQ ID NO: 167912 - DNA, 15 bp, Homo sapiens
gtccagcatctaaaa

SEQ ID NO: 167913 - DNA, 15 bp, Homo sapiens
tccagcatctaaaaa

SEQ ID NO: 167914 - DNA, 15 bp, Homo sapiens
ccagcatctaaaaaa

SEQ ID NO: 167915 - DNA, 15 bp, Homo sapiens
cagcatctaaaaaat

SEQ ID NO: 167916 - DNA, 15 bp, Homo sapiens
agcatctaaaaaata

SEQ ID NO: 167917 - DNA, 15 bp, Homo sapiens
gcatctaaaaaatag

SEQ ID NO: 167918 - DNA, 15 bp, Homo sapiens
catctaaaaaatagg

SEQ ID NO: 167919 - DNA, 15 bp, Homo sapiens
atctaaaaaataggt

SEQ ID NO: 167920 - DNA, 15 bp, Homo sapiens
tctaaaaaataggta

SEQ ID NO: 167921 - DNA, 15 bp, Homo sapiens
ctaaaaaataggtaa

SEQ ID NO: 167922 - DNA, 15 bp, Homo sapiens
taaaaaataggtaat

SEQ ID NO: 167923 - DNA, 15 bp, Homo sapiens
aaaaaataggtaata

SEQ ID NO: 167924 - DNA, 15 bp, Homo sapiens
aaaaataggtaataa

SEQ ID NO: 167925 - DNA, 15 bp, Homo sapiens
aaaataggtaataaa

SEQ ID NO: 167926 - DNA, 15 bp, Homo sapiens
aaataggtaataaag

SEQ ID NO: 167927 - DNA, 15 bp, Homo sapiens
aataggtaataaaga

SEQ ID NO: 167928 - DNA, 15 bp, Homo sapiens
ataggtaataaagat

SEQ ID NO: 167929 - DNA, 15 bp, Homo sapiens
taggtaataaagata

SEQ ID NO: 167930 - DNA, 15 bp, Homo sapiens
aggtaataaagataa

SEQ ID NO: 167931 - DNA, 15 bp, Homo sapiens
ggtaataaagataat

SEQ ID NO: 167932 - DNA, 15 bp, Homo sapiens
gtaataaagataatt

SEQ ID NO: 167933 - DNA, 15 bp, Homo sapiens
taataaagataattt

SEQ ID NO: 167934 - DNA, 15 bp, Homo sapiens
aataaagataatttc

SEQ ID NO: 167935 - DNA, 15 bp, Homo sapiens
ataaagataatttct

SEQ ID NO: 167936 - DNA, 15 bp, Homo sapiens
taaagataatttctt

SEQ ID NO: 167937 - DNA, 15 bp, Homo sapiens
aaagataatttcttt

SEQ ID NO: 167938 - DNA, 15 bp, Homo sapiens
aagataatttctttg

SEQ ID NO: 167939 - DNA, 15 bp, Homo sapiens
agataatttctttgg

SEQ ID NO: 167940 - DNA, 15 bp, Homo sapiens
gataatttctttggg

SEQ ID NO: 167941 - DNA, 15 bp, Homo sapiens
ataatttctttggga

SEQ ID NO: 167942 - DNA, 15 bp, Homo sapiens
taatttctttgggat

SEQ ID NO: 167943 - DNA, 15 bp, Homo sapiens
aatttctttgggata

SEQ ID NO: 167944 - DNA, 15 bp, Homo sapiens
atttctttgggatag

SEQ ID NO: 167945 - DNA, 15 bp, Homo sapiens
tttctttgggatagt

SEQ ID NO: 167946 - DNA, 15 bp, Homo sapiens
ttctttgggatagtg

SEQ ID NO: 167947 - DNA, 15 bp, Homo sapiens
tctttgggatagtgc

SEQ ID NO: 167948 - DNA, 15 bp, Homo sapiens
ctttgggatagtgcc

SEQ ID NO: 167949 - DNA, 15 bp, Homo sapiens
tttgggatagtgcct

SEQ ID NO: 167950 - DNA, 15 bp, Homo sapiens
ttgggatagtgccta

SEQ ID NO: 167951 - DNA, 15 bp, Homo sapiens
tgggatagtgcctag

SEQ ID NO: 167952 - DNA, 15 bp, Homo sapiens
gggatagtgcctagt

SEQ ID NO: 167953 - DNA, 15 bp, Homo sapiens
ggatagtgcctagtg

SEQ ID NO: 167954 - DNA, 15 bp, Homo sapiens
gatagtgcctagtga

SEQ ID NO: 167955 - DNA, 15 bp, Homo sapiens
atagtgcctagtgag

SEQ ID NO: 167956 - DNA, 15 bp, Homo sapiens
tagtgcctagtgaga

SEQ ID NO: 167957 - DNA, 15 bp, Homo sapiens
agtgcctagtgagaa

SEQ ID NO: 167958 - DNA, 15 bp, Homo sapiens
gtgcctagtgagaag

SEQ ID NO: 167959 - DNA, 15 bp, Homo sapiens
tgcctagtgagaagg

SEQ ID NO: 167960 - DNA, 15 bp, Homo sapiens
gcctagtgagaaggc

SEQ ID NO: 167961 - DNA, 15 bp, Homo sapiens
cctagtgagaaggct

SEQ ID NO: 167962 - DNA, 15 bp, Homo sapiens
ctagtgagaaggctt

SEQ ID NO: 167963 - DNA, 15 bp, Homo sapiens
tagtgagaaggcttg

SEQ ID NO: 167964 - DNA, 15 bp, Homo sapiens
agtgagaaggcttga

SEQ ID NO: 167965 - DNA, 15 bp, Homo sapiens
gtgagaaggcttgat

SEQ ID NO: 167966 - DNA, 15 bp, Homo sapiens
tgagaaggcttgata

SEQ ID NO: 167967 - DNA, 15 bp, Homo sapiens
gagaaggcttgatat

SEQ ID NO: 167968 - DNA, 15 bp, Homo sapiens
agaaggcttgatatt

SEQ ID NO: 167969 - DNA, 15 bp, Homo sapiens
gaaggcttgatattt

SEQ ID NO: 167970 - DNA, 15 bp, Homo sapiens
aaggcttgatattta

SEQ ID NO: 167971 - DNA, 15 bp, Homo sapiens
aggcttgatatttat

SEQ ID NO: 167972 - DNA, 15 bp, Homo sapiens
ggcttgatatttatt

SEQ ID NO: 167973 - DNA, 15 bp, Homo sapiens
gcttgatatttattc

SEQ ID NO: 167974 - DNA, 15 bp, Homo sapiens
cttgatatttattct

SEQ ID NO: 167975 - DNA, 15 bp, Homo sapiens
ttgatatttattctt

SEQ ID NO: 167976 - DNA, 15 bp, Homo sapiens
tgatatttattcttt

SEQ ID NO: 167977 - DNA, 15 bp, Homo sapiens
gatatttattctttt

SEQ ID NO: 167978 - DNA, 15 bp, Homo sapiens
atatttattcttttg

SEQ ID NO: 167979 - DNA, 15 bp, Homo sapiens
tatttattcttttgt

SEQ ID NO: 167980 - DNA, 15 bp, Homo sapiens
atttattcttttgtg

SEQ ID NO: 167981 - DNA, 15 bp, Homo sapiens
tttattcttttgtga

SEQ ID NO: 167982 - DNA, 15 bp, Homo sapiens
ttattcttttgtgag

SEQ ID NO: 167983 - DNA, 15 bp, Homo sapiens
tattcttttgtgagt

SEQ ID NO: 167984 - DNA, 15 bp, Homo sapiens
attcttttgtgagta

SEQ ID NO: 167985 - DNA, 15 bp, Homo sapiens
ttcttttgtgagtat

SEQ ID NO: 167986 - DNA, 15 bp, Homo sapiens
tcttttgtgagtata

SEQ ID NO: 167987 - DNA, 15 bp, Homo sapiens
cttttgtgagtatat

SEQ ID NO: 167988 - DNA, 15 bp, Homo sapiens
ttttgtgagtatata

SEQ ID NO: 167989 - DNA, 15 bp, Homo sapiens
tttgtgagtatataa

SEQ ID NO: 167990 - DNA, 15 bp, Homo sapiens
ttgtgagtatataaa

SEQ ID NO: 167991 - DNA, 15 bp, Homo sapiens
tgtgagtatataaat

SEQ ID NO: 167992 - DNA, 15 bp, Homo sapiens
gtgagtatataaatg

SEQ ID NO: 167993 - DNA, 15 bp, Homo sapiens
tgagtatataaatgg

SEQ ID NO: 167994 - DNA, 15 bp, Homo sapiens
gagtatataaatggt

SEQ ID NO: 167995 - DNA, 15 bp, Homo sapiens
agtatataaatggtg

SEQ ID NO: 167996 - DNA, 15 bp, Homo sapiens
gtatataaatggtgc

SEQ ID NO: 167997 - DNA, 15 bp, Homo sapiens
tatataaatggtgcc

SEQ ID NO: 167998 - DNA, 15 bp, Homo sapiens
atataaatggtgcct

SEQ ID NO: 167999 - DNA, 15 bp, Homo sapiens
tataaatggtgcctc

SEQ ID NO: 168000 - DNA, 15 bp, Homo sapiens
ataaatggtgcctct

SEQ ID NO: 168001 - DNA, 15 bp, Homo sapiens
taaatggtgcctcta

SEQ ID NO: 168002 - DNA, 15 bp, Homo sapiens
aaatggtgcctctaa

SEQ ID NO: 168003 - DNA, 15 bp, Homo sapiens
aatggtgcctctaac

SEQ ID NO: 168004 - DNA, 15 bp, Homo sapiens
atggtgcctctaaca

SEQ ID NO: 168005 - DNA, 15 bp, Homo sapiens
tggtgcctctaacat

SEQ ID NO: 168006 - DNA, 15 bp, Homo sapiens
ggtgcctctaacata

SEQ ID NO: 168007 - DNA, 15 bp, Homo sapiens
gtgcctctaacataa

SEQ ID NO: 168008 - DNA, 15 bp, Homo sapiens
tgcctctaacataaa

SEQ ID NO: 168009 - DNA, 15 bp, Homo sapiens
gcctctaacataaag

SEQ ID NO: 168010 - DNA, 15 bp, Homo sapiens
cctctaacataaagg

SEQ ID NO: 168011 - DNA, 15 bp, Homo sapiens
ctctaacataaaggg

SEQ ID NO: 168012 - DNA, 15 bp, Homo sapiens
tctaacataaaggga

SEQ ID NO: 168013 - DNA, 15 bp, Homo sapiens
ctaacataaagggaa

SEQ ID NO: 168014 - DNA, 15 bp, Homo sapiens
taacataaagggaaa

SEQ ID NO: 168015 - DNA, 15 bp, Homo sapiens
aacataaagggaaat

SEQ ID NO: 168016 - DNA, 15 bp, Homo sapiens
acataaagggaaata

SEQ ID NO: 168017 - DNA, 15 bp, Homo sapiens
cataaagggaaataa

SEQ ID NO: 168018 - DNA, 15 bp, Homo sapiens
ataaagggaaataaa

SEQ ID NO: 168019 - DNA, 15 bp, Homo sapiens
taaagggaaataaaa

SEQ ID NO: 168020 - DNA, 15 bp, Homo sapiens
aaagggaaataaaac

SEQ ID NO: 168021 - DNA, 15 bp, Homo sapiens
aagggaaataaaact

SEQ ID NO: 168022 - DNA, 15 bp, Homo sapiens
agggaaataaaactg

SEQ ID NO: 168023 - DNA, 15 bp, Homo sapiens
gggaaataaaactga

SEQ ID NO: 168024 - DNA, 15 bp, Homo sapiens
ggaaataaaactgag

SEQ ID NO: 168025 - DNA, 15 bp, Homo sapiens
gaaataaaactgagc

SEQ ID NO: 168026 - DNA, 15 bp, Homo sapiens
aaataaaactgagca

SEQ ID NO: 168027 - DNA, 15 bp, Homo sapiens
aataaaactgagcaa

SEQ ID NO: 168028 - DNA, 15 bp, Homo sapiens
ataaaactgagcaaa

SEQ ID NO: 168029 - DNA, 15 bp, Homo sapiens
taaaactgagcaaaa

SEQ ID NO: 168030 - DNA, 15 bp, Homo sapiens
aaaactgagcaaaac

SEQ ID NO: 168031 - DNA, 15 bp, Homo sapiens
aaactgagcaaaaca

SEQ ID NO: 168032 - DNA, 15 bp, Homo sapiens
aactgagcaaaacag

SEQ ID NO: 168033 - DNA, 15 bp, Homo sapiens
actgagcaaaacagt

SEQ ID NO: 168034 - DNA, 15 bp, Homo sapiens
ctgagcaaaacagta

SEQ ID NO: 168035 - DNA, 15 bp, Homo sapiens
tgagcaaaacagtat

SEQ ID NO: 168036 - DNA, 15 bp, Homo sapiens
gagcaaaacagtata

SEQ ID NO: 168037 - DNA, 15 bp, Homo sapiens
agcaaaacagtatag

SEQ ID NO: 168038 - DNA, 15 bp, Homo sapiens
gcaaaacagtatagt

SEQ ID NO: 168039 - DNA, 15 bp, Homo sapiens
caaaacagtatagtg

SEQ ID NO: 168040 - DNA, 15 bp, Homo sapiens
aaaacagtatagtgg

SEQ ID NO: 168041 - DNA, 15 bp, Homo sapiens
aaacagtatagtgga

SEQ ID NO: 168042 - DNA, 15 bp, Homo sapiens
aacagtatagtggaa

SEQ ID NO: 168043 - DNA, 15 bp, Homo sapiens
acagtatagtggaaa

SEQ ID NO: 168044 - DNA, 15 bp, Homo sapiens
cagtatagtggaaag

SEQ ID NO: 168045 - DNA, 15 bp, Homo sapiens
agtatagtggaaaga

SEQ ID NO: 168046 - DNA, 15 bp, Homo sapiens
gtatagtggaaagaa

SEQ ID NO: 168047 - DNA, 15 bp, Homo sapiens
tatagtggaaagaat

SEQ ID NO: 168048 - DNA, 15 bp, Homo sapiens
atagtggaaagaatg

SEQ ID NO: 168049 - DNA, 15 bp, Homo sapiens
tagtggaaagaatga

SEQ ID NO: 168050 - DNA, 15 bp, Homo sapiens
agtggaaagaatgag

SEQ ID NO: 168051 - DNA, 15 bp, Homo sapiens
gtggaaagaatgagg

SEQ ID NO: 168052 - DNA, 15 bp, Homo sapiens
tggaaagaatgaggg

SEQ ID NO: 168053 - DNA, 15 bp, Homo sapiens
ggaaagaatgagggc

SEQ ID NO: 168054 - DNA, 15 bp, Homo sapiens
gaaagaatgagggct

SEQ ID NO: 168055 - DNA, 15 bp, Homo sapiens
aaagaatgagggctt

SEQ ID NO: 168056 - DNA, 15 bp, Homo sapiens
aagaatgagggcttt

SEQ ID NO: 168057 - DNA, 15 bp, Homo sapiens
agaatgagggctttg

SEQ ID NO: 168058 - DNA, 15 bp, Homo sapiens
gaatgagggctttga

SEQ ID NO: 168059 - DNA, 15 bp, Homo sapiens
aatgagggctttgaa

SEQ ID NO: 168060 - DNA, 15 bp, Homo sapiens
atgagggctttgaag

SEQ ID NO: 168061 - DNA, 15 bp, Homo sapiens
tgagggctttgaagt

SEQ ID NO: 168062 - DNA, 15 bp, Homo sapiens
gagggctttgaagtc

SEQ ID NO: 168063 - DNA, 15 bp, Homo sapiens
agggctttgaagtcc

SEQ ID NO: 168064 - DNA, 15 bp, Homo sapiens
gggctttgaagtccg

SEQ ID NO: 168065 - DNA, 15 bp, Homo sapiens
ggctttgaagtccga

SEQ ID NO: 168066 - DNA, 15 bp, Homo sapiens
gctttgaagtccgaa

SEQ ID NO: 168067 - DNA, 15 bp, Homo sapiens
ctttgaagtccgaac

SEQ ID NO: 168068 - DNA, 15 bp, Homo sapiens
tttgaagtccgaact

SEQ ID NO: 168069 - DNA, 15 bp, Homo sapiens
ttgaagtccgaactg

SEQ ID NO: 168070 - DNA, 15 bp, Homo sapiens
tgaagtccgaactgc

SEQ ID NO: 168071 - DNA, 15 bp, Homo sapiens
gaagtccgaactgca

SEQ ID NO: 168072 - DNA, 15 bp, Homo sapiens
aagtccgaactgcat

SEQ ID NO: 168073 - DNA, 15 bp, Homo sapiens
agtccgaactgcatt

SEQ ID NO: 168074 - DNA, 15 bp, Homo sapiens
gtccgaactgcattc

SEQ ID NO: 168075 - DNA, 15 bp, Homo sapiens
tccgaactgcattca

SEQ ID NO: 168076 - DNA, 15 bp, Homo sapiens
ccgaactgcattcaa

SEQ ID NO: 168077 - DNA, 15 bp, Homo sapiens
cgaactgcattcaaa

SEQ ID NO: 168078 - DNA, 15 bp, Homo sapiens
gaactgcattcaaat

SEQ ID NO: 168079 - DNA, 15 bp, Homo sapiens
aactgcattcaaatt

SEQ ID NO: 168080 - DNA, 15 bp, Homo sapiens
actgcattcaaattc

SEQ ID NO: 168081 - DNA, 15 bp, Homo sapiens
ctgcattcaaattct

SEQ ID NO: 168082 - DNA, 15 bp, Homo sapiens
tgcattcaaattctg

SEQ ID NO: 168083 - DNA, 15 bp, Homo sapiens
gcattcaaattctgt

SEQ ID NO: 168084 - DNA, 15 bp, Homo sapiens
cattcaaattctgtc

SEQ ID NO: 168085 - DNA, 15 bp, Homo sapiens
attcaaattctgtct

SEQ ID NO: 168086 - DNA, 15 bp, Homo sapiens
ttcaaattctgtctt

SEQ ID NO: 168087 - DNA, 15 bp, Homo sapiens
tcaaattctgtcttt

SEQ ID NO: 168088 - DNA, 15 bp, Homo sapiens
caaattctgtcttta

SEQ ID NO: 168089 - DNA, 15 bp, Homo sapiens
aaattctgtctttac

SEQ ID NO: 168090 - DNA, 15 bp, Homo sapiens
aattctgtctttacc

SEQ ID NO: 168091 - DNA, 15 bp, Homo sapiens
attctgtctttacca

SEQ ID NO: 168092 - DNA, 15 bp, Homo sapiens
ttctgtctttaccat

SEQ ID NO: 168093 - DNA, 15 bp, Homo sapiens
tctgtctttaccatt

SEQ ID NO: 168094 - DNA, 15 bp, Homo sapiens
ctgtctttaccattt

SEQ ID NO: 168095 - DNA, 15 bp, Homo sapiens
tgtctttaccattta

SEQ ID NO: 168096 - DNA, 15 bp, Homo sapiens
gtctttaccatttac

SEQ ID NO: 168097 - DNA, 15 bp, Homo sapiens
tctttaccatttact

SEQ ID NO: 168098 - DNA, 15 bp, Homo sapiens
ctttaccatttactg

SEQ ID NO: 168099 - DNA, 15 bp, Homo sapiens
tttaccatttactgg

SEQ ID NO: 168100 - DNA, 15 bp, Homo sapiens
ttaccatttactggt

SEQ ID NO: 168101 - DNA, 15 bp, Homo sapiens
taccatttactggtt

SEQ ID NO: 168102 - DNA, 15 bp, Homo sapiens
accatttactggttc

SEQ ID NO: 168103 - DNA, 15 bp, Homo sapiens
ccatttactggttct

SEQ ID NO: 168104 - DNA, 15 bp, Homo sapiens
catttactggttctg

SEQ ID NO: 168105 - DNA, 15 bp, Homo sapiens
atttactggttctgt

SEQ ID NO: 168106 - DNA, 15 bp, Homo sapiens
tttactggttctgtg

SEQ ID NO: 168107 - DNA, 15 bp, Homo sapiens
ttactggttctgtga

SEQ ID NO: 168108 - DNA, 15 bp, Homo sapiens
tactggttctgtgac

SEQ ID NO: 168109 - DNA, 15 bp, Homo sapiens
actggttctgtgact

SEQ ID NO: 168110 - DNA, 15 bp, Homo sapiens
ctggttctgtgactc

SEQ ID NO: 168111 - DNA, 15 bp, Homo sapiens
tggttctgtgactct

SEQ ID NO: 168112 - DNA, 15 bp, Homo sapiens
ggttctgtgactctt

SEQ ID NO: 168113 - DNA, 15 bp, Homo sapiens
gttctgtgactcttg

SEQ ID NO: 168114 - DNA, 15 bp, Homo sapiens
ttctgtgactcttgg

SEQ ID NO: 168115 - DNA, 15 bp, Homo sapiens
tctgtgactcttggg

SEQ ID NO: 168116 - DNA, 15 bp, Homo sapiens
ctgtgactcttgggc

SEQ ID NO: 168117 - DNA, 15 bp, Homo sapiens
tgtgactcttgggca

SEQ ID NO: 168118 - DNA, 15 bp, Homo sapiens
gtgactcttgggcaa

SEQ ID NO: 168119 - DNA, 15 bp, Homo sapiens
tgactcttgggcaag

SEQ ID NO: 168120 - DNA, 15 bp, Homo sapiens
gactcttgggcaagt

SEQ ID NO: 168121 - DNA, 15 bp, Homo sapiens
actcttgggcaagtg

SEQ ID NO: 168122 - DNA, 15 bp, Homo sapiens
ctcttgggcaagtga

SEQ ID NO: 168123 - DNA, 15 bp, Homo sapiens
tcttgggcaagtgac

SEQ ID NO: 168124 - DNA, 15 bp, Homo sapiens
cttgggcaagtgact

SEQ ID NO: 168125 - DNA, 15 bp, Homo sapiens
ttgggcaagtgactt

SEQ ID NO: 168126 - DNA, 15 bp, Homo sapiens
tgggcaagtgactta

SEQ ID NO: 168127 - DNA, 15 bp, Homo sapiens
gggcaagtgacttaa

SEQ ID NO: 168128 - DNA, 15 bp, Homo sapiens
ggcaagtgacttaac

SEQ ID NO: 168129 - DNA, 15 bp, Homo sapiens
gcaagtgacttaact

SEQ ID NO: 168130 - DNA, 15 bp, Homo sapiens
caagtgacttaacta

SEQ ID NO: 168131 - DNA, 15 bp, Homo sapiens
aagtgacttaactac

SEQ ID NO: 168132 - DNA, 15 bp, Homo sapiens
agtgacttaactact

SEQ ID NO: 168133 - DNA, 15 bp, Homo sapiens
gtgacttaactactg

SEQ ID NO: 168134 - DNA, 15 bp, Homo sapiens
tgacttaactactgt

SEQ ID NO: 168135 - DNA, 15 bp, Homo sapiens
gacttaactactgta

SEQ ID NO: 168136 - DNA, 15 bp, Homo sapiens
acttaactactgtaa

SEQ ID NO: 168137 - DNA, 15 bp, Homo sapiens
cttaactactgtaag

SEQ ID NO: 168138 - DNA, 15 bp, Homo sapiens
ttaactactgtaaga

SEQ ID NO: 168139 - DNA, 15 bp, Homo sapiens
taactactgtaagag

SEQ ID NO: 168140 - DNA, 15 bp, Homo sapiens
aactactgtaagagt

SEQ ID NO: 168141 - DNA, 15 bp, Homo sapiens
actactgtaagagtt

SEQ ID NO: 168142 - DNA, 15 bp, Homo sapiens
ctactgtaagagtta

SEQ ID NO: 168143 - DNA, 15 bp, Homo sapiens
tactgtaagagttag

SEQ ID NO: 168144 - DNA, 15 bp, Homo sapiens
actgtaagagttagt

SEQ ID NO: 168145 - DNA, 15 bp, Homo sapiens
ctgtaagagttagtt

SEQ ID NO: 168146 - DNA, 15 bp, Homo sapiens
tgtaagagttagttt

SEQ ID NO: 168147 - DNA, 15 bp, Homo sapiens
gtaagagttagtttc

SEQ ID NO: 168148 - DNA, 15 bp, Homo sapiens
taagagttagtttcc

SEQ ID NO: 168149 - DNA, 15 bp, Homo sapiens
aagagttagtttccc

SEQ ID NO: 168150 - DNA, 15 bp, Homo sapiens
agagttagtttccct

SEQ ID NO: 168151 - DNA, 15 bp, Homo sapiens
gagttagtttccctg

SEQ ID NO: 168152 - DNA, 15 bp, Homo sapiens
agttagtttccctgg

SEQ ID NO: 168153 - DNA, 15 bp, Homo sapiens
gttagtttccctgga

SEQ ID NO: 168154 - DNA, 15 bp, Homo sapiens
ttagtttccctggaa

SEQ ID NO: 168155 - DNA, 15 bp, Homo sapiens
tagtttccctggaag

SEQ ID NO: 168156 - DNA, 15 bp, Homo sapiens
agtttccctggaaga

SEQ ID NO: 168157 - DNA, 15 bp, Homo sapiens
gtttccctggaagat

SEQ ID NO: 168158 - DNA, 15 bp, Homo sapiens
tttccctggaagatc

SEQ ID NO: 168159 - DNA, 15 bp, Homo sapiens
ttccctggaagatct

SEQ ID NO: 168160 - DNA, 15 bp, Homo sapiens
tccctggaagatcta

SEQ ID NO: 168161 - DNA, 15 bp, Homo sapiens
ccctggaagatctac

SEQ ID NO: 168162 - DNA, 15 bp, Homo sapiens
cctggaagatctacc

SEQ ID NO: 168163 - DNA, 15 bp, Homo sapiens
ctggaagatctacct

SEQ ID NO: 168164 - DNA, 15 bp, Homo sapiens
tggaagatctacctc

SEQ ID NO: 168165 - DNA, 15 bp, Homo sapiens
ggaagatctacctcc

SEQ ID NO: 168166 - DNA, 15 bp, Homo sapiens
gaagatctacctcct

SEQ ID NO: 168167 - DNA, 15 bp, Homo sapiens
aagatctacctccta

SEQ ID NO: 168168 - DNA, 15 bp, Homo sapiens
agatctacctcctag

SEQ ID NO: 168169 - DNA, 15 bp, Homo sapiens
gatctacctcctagc

SEQ ID NO: 168170 - DNA, 15 bp, Homo sapiens
atctacctcctagct

SEQ ID NO: 168171 - DNA, 15 bp, Homo sapiens
tctacctcctagctt

SEQ ID NO: 168172 - DNA, 15 bp, Homo sapiens
ctacctcctagcttt

SEQ ID NO: 168173 - DNA, 15 bp, Homo sapiens
tacctcctagctttg

SEQ ID NO: 168174 - DNA, 15 bp, Homo sapiens
acctcctagctttgt

SEQ ID NO: 168175 - DNA, 15 bp, Homo sapiens
cctcctagctttgtg

SEQ ID NO: 168176 - DNA, 15 bp, Homo sapiens
ctcctagctttgtgc

SEQ ID NO: 168177 - DNA, 15 bp, Homo sapiens
tcctagctttgtgct

SEQ ID NO: 168178 - DNA, 15 bp, Homo sapiens
cctagctttgtgcta

SEQ ID NO: 168179 - DNA, 15 bp, Homo sapiens
ctagctttgtgctat

SEQ ID NO: 168180 - DNA, 15 bp, Homo sapiens
tagctttgtgctata

SEQ ID NO: 168181 - DNA, 15 bp, Homo sapiens
agctttgtgctatag

SEQ ID NO: 168182 - DNA, 15 bp, Homo sapiens
gctttgtgctataga

SEQ ID NO: 168183 - DNA, 15 bp, Homo sapiens
ctttgtgctatagat

SEQ ID NO: 168184 - DNA, 15 bp, Homo sapiens
tttgtgctatagatg

SEQ ID NO: 168185 - DNA, 15 bp, Homo sapiens
ttgtgctatagatga

SEQ ID NO: 168186 - DNA, 15 bp, Homo sapiens
tgtgctatagatgaa

SEQ ID NO: 168187 - DNA, 15 bp, Homo sapiens
gtgctatagatgaaa

SEQ ID NO: 168188 - DNA, 15 bp, Homo sapiens
tgctatagatgaaat

SEQ ID NO: 168189 - DNA, 15 bp, Homo sapiens
gctatagatgaaatg

SEQ ID NO: 168190 - DNA, 15 bp, Homo sapiens
ctatagatgaaatga

SEQ ID NO: 168191 - DNA, 15 bp, Homo sapiens
tatagatgaaatgaa

SEQ ID NO: 168192 - DNA, 15 bp, Homo sapiens
atagatgaaatgaaa

SEQ ID NO: 168193 - DNA, 15 bp, Homo sapiens
tagatgaaatgaaaa

SEQ ID NO: 168194 - DNA, 15 bp, Homo sapiens
agatgaaatgaaaaa

SEQ ID NO: 168195 - DNA, 15 bp, Homo sapiens
gatgaaatgaaaaaa

SEQ ID NO: 168196 - DNA, 15 bp, Homo sapiens
atgaaatgaaaaaaa

SEQ ID NO: 168197 - DNA, 15 bp, Homo sapiens
tgaaatgaaaaaaat

SEQ ID NO: 168198 - DNA, 15 bp, Homo sapiens
gaaatgaaaaaaatt

SEQ ID NO: 168199 - DNA, 15 bp, Homo sapiens
aaatgaaaaaaattt

SEQ ID NO: 168200 - DNA, 15 bp, Homo sapiens
aatgaaaaaaattta

SEQ ID NO: 168201 - DNA, 15 bp, Homo sapiens
atgaaaaaaatttac

SEQ ID NO: 168202 - DNA, 15 bp, Homo sapiens
tgaaaaaaatttaca

SEQ ID NO: 168203 - DNA, 15 bp, Homo sapiens
gaaaaaaatttacat

SEQ ID NO: 168204 - DNA, 15 bp, Homo sapiens
aaaaaaatttacatg

SEQ ID NO: 168205 - DNA, 15 bp, Homo sapiens
aaaaaatttacatgt

SEQ ID NO: 168206 - DNA, 15 bp, Homo sapiens
aaaaatttacatgtg

SEQ ID NO: 168207 - DNA, 15 bp, Homo sapiens
aaaatttacatgtgc

SEQ ID NO: 168208 - DNA, 15 bp, Homo sapiens
aaatttacatgtgcc

SEQ ID NO: 168209 - DNA, 15 bp, Homo sapiens
aatttacatgtgcca

SEQ ID NO: 168210 - DNA, 15 bp, Homo sapiens
atttacatgtgccag

SEQ ID NO: 168211 - DNA, 15 bp, Homo sapiens
tttacatgtgccagt

SEQ ID NO: 168212 - DNA, 15 bp, Homo sapiens
ttacatgtgccagta

SEQ ID NO: 168213 - DNA, 15 bp, Homo sapiens
tacatgtgccagtac

SEQ ID NO: 168214 - DNA, 15 bp, Homo sapiens
acatgtgccagtact

SEQ ID NO: 168215 - DNA, 15 bp, Homo sapiens
catgtgccagtactg

SEQ ID NO: 168216 - DNA, 15 bp, Homo sapiens
atgtgccagtactgg

SEQ ID NO: 168217 - DNA, 15 bp, Homo sapiens
tgtgccagtactggt

SEQ ID NO: 168218 - DNA, 15 bp, Homo sapiens
gtgccagtactggtg

SEQ ID NO: 168219 - DNA, 15 bp, Homo sapiens
tgccagtactggtga

SEQ ID NO: 168220 - DNA, 15 bp, Homo sapiens
gccagtactggtgag

SEQ ID NO: 168221 - DNA, 15 bp, Homo sapiens
ccagtactggtgaga

SEQ ID NO: 168222 - DNA, 15 bp, Homo sapiens
cagtactggtgagag

SEQ ID NO: 168223 - DNA, 15 bp, Homo sapiens
agtactggtgagagc

SEQ ID NO: 168224 - DNA, 15 bp, Homo sapiens
gtactggtgagagcg

SEQ ID NO: 168225 - DNA, 15 bp, Homo sapiens
tactggtgagagcgc

SEQ ID NO: 168226 - DNA, 15 bp, Homo sapiens
actggtgagagcgca

SEQ ID NO: 168227 - DNA, 15 bp, Homo sapiens
ctggtgagagcgcaa

SEQ ID NO: 168228 - DNA, 15 bp, Homo sapiens
tggtgagagcgcaag

SEQ ID NO: 168229 - DNA, 15 bp, Homo sapiens
ggtgagagcgcaagc

SEQ ID NO: 168230 - DNA, 15 bp, Homo sapiens
gtgagagcgcaagct

SEQ ID NO: 168231 - DNA, 15 bp, Homo sapiens
tgagagcgcaagctt

SEQ ID NO: 168232 - DNA, 15 bp, Homo sapiens
gagagcgcaagcttt

SEQ ID NO: 168233 - DNA, 15 bp, Homo sapiens
agagcgcaagctttg

SEQ ID NO: 168234 - DNA, 15 bp, Homo sapiens
gagcgcaagctttgg

SEQ ID NO: 168235 - DNA, 15 bp, Homo sapiens
agcgcaagctttgga

SEQ ID NO: 168236 - DNA, 15 bp, Homo sapiens
gcgcaagctttggag

SEQ ID NO: 168237 - DNA, 15 bp, Homo sapiens
cgcaagctttggagt

SEQ ID NO: 168238 - DNA, 15 bp, Homo sapiens
gcaagctttggagtc

SEQ ID NO: 168239 - DNA, 15 bp, Homo sapiens
caagctttggagtca

SEQ ID NO: 168240 - DNA, 15 bp, Homo sapiens
aagctttggagtcaa

SEQ ID NO: 168241 - DNA, 15 bp, Homo sapiens
agctttggagtcaaa

SEQ ID NO: 168242 - DNA, 15 bp, Homo sapiens
ctttggagtcaaaca

SEQ ID NO: 168243 - DNA, 15 bp, Homo sapiens
tttggagtcaaacac

SEQ ID NO: 168244 - DNA, 15 bp, Homo sapiens
ttggagtcaaacaca

SEQ ID NO: 168245 - DNA, 15 bp, Homo sapiens
tggagtcaaacacaa

SEQ ID NO: 168246 - DNA, 15 bp, Homo sapiens
ggagtcaaacacaaa

SEQ ID NO: 168247 - DNA, 15 bp, Homo sapiens
gagtcaaacacaaat

SEQ ID NO: 168248 - DNA, 15 bp, Homo sapiens
agtcaaacacaaatg

SEQ ID NO: 168249 - DNA, 15 bp, Homo sapiens
gtcaaacacaaatgg

SEQ ID NO: 168250 - DNA, 15 bp, Homo sapiens
tcaaacacaaatggg

SEQ ID NO: 168251 - DNA, 15 bp, Homo sapiens
caaacacaaatgggt

SEQ ID NO: 168252 - DNA, 15 bp, Homo sapiens
aaacacaaatgggtt

SEQ ID NO: 168253 - DNA, 15 bp, Homo sapiens
aacacaaatgggttt

SEQ ID NO: 168254 - DNA, 15 bp, Homo sapiens
acacaaatgggtttg

SEQ ID NO: 168255 - DNA, 15 bp, Homo sapiens
cacaaatgggtttgc

SEQ ID NO: 168256 - DNA, 15 bp, Homo sapiens
acaaatgggtttgca

SEQ ID NO: 168257 - DNA, 15 bp, Homo sapiens
caaatgggtttgcat

SEQ ID NO: 168258 - DNA, 15 bp, Homo sapiens
aaatgggtttgcatc

SEQ ID NO: 168259 - DNA, 15 bp, Homo sapiens
aatgggtttgcatcc

SEQ ID NO: 168260 - DNA, 15 bp, Homo sapiens
atgggtttgcatcct

SEQ ID NO: 168261 - DNA, 15 bp, Homo sapiens
tgggtttgcatcctg

SEQ ID NO: 168262 - DNA, 15 bp, Homo sapiens
gggtttgcatcctgg

SEQ ID NO: 168263 - DNA, 15 bp, Homo sapiens
ggtttgcatcctggc

SEQ ID NO: 168264 - DNA, 15 bp, Homo sapiens
gtttgcatcctggcc

SEQ ID NO: 168265 - DNA, 15 bp, Homo sapiens
tttgcatcctggccc

SEQ ID NO: 168266 - DNA, 15 bp, Homo sapiens
ttgcatcctggccct

SEQ ID NO: 168267 - DNA, 15 bp, Homo sapiens
tgcatcctggcccta

SEQ ID NO: 168268 - DNA, 15 bp, Homo sapiens
gcatcctggccctac

SEQ ID NO: 168269 - DNA, 15 bp, Homo sapiens
catcctggccctacc

SEQ ID NO: 168270 - DNA, 15 bp, Homo sapiens
atcctggccctacca

SEQ ID NO: 168271 - DNA, 15 bp, Homo sapiens
tcctggccctaccaa

SEQ ID NO: 168272 - DNA, 15 bp, Homo sapiens
cctggccctaccaat

SEQ ID NO: 168273 - DNA, 15 bp, Homo sapiens
ctggccctaccaatt

SEQ ID NO: 168274 - DNA, 15 bp, Homo sapiens
tggccctaccaatta

SEQ ID NO: 168275 - DNA, 15 bp, Homo sapiens
ggccctaccaattat

SEQ ID NO: 168276 - DNA, 15 bp, Homo sapiens
gccctaccaattatg

SEQ ID NO: 168277 - DNA, 15 bp, Homo sapiens
ccctaccaattatga

SEQ ID NO: 168278 - DNA, 15 bp, Homo sapiens
cctaccaattatgag

SEQ ID NO: 168279 - DNA, 15 bp, Homo sapiens
ctaccaattatgagc

SEQ ID NO: 168280 - DNA, 15 bp, Homo sapiens
taccaattatgagct

SEQ ID NO: 168281 - DNA, 15 bp, Homo sapiens
accaattatgagctc

SEQ ID NO: 168282 - DNA, 15 bp, Homo sapiens
ccaattatgagctct

SEQ ID NO: 168283 - DNA, 15 bp, Homo sapiens
caattatgagctctg

SEQ ID NO: 168284 - DNA, 15 bp, Homo sapiens
aattatgagctctga

SEQ ID NO: 168285 - DNA, 15 bp, Homo sapiens
attatgagctctgag

SEQ ID NO: 168286 - DNA, 15 bp, Homo sapiens
ttatgagctctgagc

SEQ ID NO: 168287 - DNA, 15 bp, Homo sapiens
tatgagctctgagcc

SEQ ID NO: 168288 - DNA, 15 bp, Homo sapiens
atgagctctgagcca

SEQ ID NO: 168289 - DNA, 15 bp, Homo sapiens
tgagctctgagccat

SEQ ID NO: 168290 - DNA, 15 bp, Homo sapiens
gagctctgagccatg

SEQ ID NO: 168291 - DNA, 15 bp, Homo sapiens
agctctgagccatgg

SEQ ID NO: 168292 - DNA, 15 bp, Homo sapiens
gctctgagccatggg

SEQ ID NO: 168293 - DNA, 15 bp, Homo sapiens
ctctgagccatgggc

SEQ ID NO: 168294 - DNA, 15 bp, Homo sapiens
tctgagccatgggca

SEQ ID NO: 168295 - DNA, 15 bp, Homo sapiens
ctgagccatgggcaa

SEQ ID NO: 168296 - DNA, 15 bp, Homo sapiens
tgagccatgggcaag

SEQ ID NO: 168297 - DNA, 15 bp, Homo sapiens
gagccatgggcaagt

SEQ ID NO: 168298 - DNA, 15 bp, Homo sapiens
agccatgggcaagtg

SEQ ID NO: 168299 - DNA, 15 bp, Homo sapiens
gccatgggcaagtga

SEQ ID NO: 168300 - DNA, 15 bp, Homo sapiens
ccatgggcaagtgac

SEQ ID NO: 168301 - DNA, 15 bp, Homo sapiens
catgggcaagtgact

SEQ ID NO: 168302 - DNA, 15 bp, Homo sapiens
atgggcaagtgacta

SEQ ID NO: 168303 - DNA, 15 bp, Homo sapiens
tgggcaagtgactaa

SEQ ID NO: 168304 - DNA, 15 bp, Homo sapiens
gggcaagtgactaac

SEQ ID NO: 168305 - DNA, 15 bp, Homo sapiens
ggcaagtgactaact

SEQ ID NO: 168306 - DNA, 15 bp, Homo sapiens
gcaagtgactaactc

SEQ ID NO: 168307 - DNA, 15 bp, Homo sapiens
caagtgactaactcc

SEQ ID NO: 168308 - DNA, 15 bp, Homo sapiens
aagtgactaactccc

SEQ ID NO: 168309 - DNA, 15 bp, Homo sapiens
agtgactaactccct

SEQ ID NO: 168310 - DNA, 15 bp, Homo sapiens
gtgactaactccctg

SEQ ID NO: 168311 - DNA, 15 bp, Homo sapiens
tgactaactccctgg

SEQ ID NO: 168312 - DNA, 15 bp, Homo sapiens
gactaactccctggg

SEQ ID NO: 168313 - DNA, 15 bp, Homo sapiens
actaactccctgggc

SEQ ID NO: 168314 - DNA, 15 bp, Homo sapiens
ctaactccctgggcc

SEQ ID NO: 168315 - DNA, 15 bp, Homo sapiens
taactccctgggcct

SEQ ID NO: 168316 - DNA, 15 bp, Homo sapiens
aactccctgggcctc

SEQ ID NO: 168317 - DNA, 15 bp, Homo sapiens
actccctgggcctca

SEQ ID NO: 168318 - DNA, 15 bp, Homo sapiens
ctccctgggcctcag

SEQ ID NO: 168319 - DNA, 15 bp, Homo sapiens
tccctgggcctcagt

SEQ ID NO: 168320 - DNA, 15 bp, Homo sapiens
ccctgggcctcagtt

SEQ ID NO: 168321 - DNA, 15 bp, Homo sapiens
cctgggcctcagttt

SEQ ID NO: 168322 - DNA, 15 bp, Homo sapiens
gggcctcagtttctc

SEQ ID NO: 168323 - DNA, 15 bp, Homo sapiens
ggcctcagtttctct

SEQ ID NO: 168324 - DNA, 15 bp, Homo sapiens
gcctcagtttctctg

SEQ ID NO: 168325 - DNA, 15 bp, Homo sapiens
cctcagtttctctgt

SEQ ID NO: 168326 - DNA, 15 bp, Homo sapiens
ctcagtttctctgta

SEQ ID NO: 168327 - DNA, 15 bp, Homo sapiens
tcagtttctctgtaa

SEQ ID NO: 168328 - DNA, 15 bp, Homo sapiens
cagtttctctgtaac

SEQ ID NO: 168329 - DNA, 15 bp, Homo sapiens
agtttctctgtaaca

SEQ ID NO: 168330 - DNA, 15 bp, Homo sapiens
gtttctctgtaacat

SEQ ID NO: 168331 - DNA, 15 bp, Homo sapiens
tttctctgtaacatc

SEQ ID NO: 168332 - DNA, 15 bp, Homo sapiens
ttctctgtaacatct

SEQ ID NO: 168333 - DNA, 15 bp, Homo sapiens
tctctgtaacatctg

SEQ ID NO: 168334 - DNA, 15 bp, Homo sapiens
ctctgtaacatctgt

SEQ ID NO: 168335 - DNA, 15 bp, Homo sapiens
tctgtaacatctgtc

SEQ ID NO: 168336 - DNA, 15 bp, Homo sapiens
ctgtaacatctgtca

SEQ ID NO: 168337 - DNA, 15 bp, Homo sapiens
tgtaacatctgtcag

SEQ ID NO: 168338 - DNA, 15 bp, Homo sapiens
gtaacatctgtcaga

SEQ ID NO: 168339 - DNA, 15 bp, Homo sapiens
taacatctgtcagac

SEQ ID NO: 168340 - DNA, 15 bp, Homo sapiens
aacatctgtcagact

SEQ ID NO: 168341 - DNA, 15 bp, Homo sapiens
acatctgtcagactt

SEQ ID NO: 168342 - DNA, 15 bp, Homo sapiens
catctgtcagacttc

SEQ ID NO: 168343 - DNA, 15 bp, Homo sapiens
atctgtcagacttca

SEQ ID NO: 168344 - DNA, 15 bp, Homo sapiens
tctgtcagacttcat

SEQ ID NO: 168345 - DNA, 15 bp, Homo sapiens
ctgtcagacttcatg

SEQ ID NO: 168346 - DNA, 15 bp, Homo sapiens
tgtcagacttcatgg

SEQ ID NO: 168347 - DNA, 15 bp, Homo sapiens
gtcagacttcatggg

SEQ ID NO: 168348 - DNA, 15 bp, Homo sapiens
tcagacttcatgggt

SEQ ID NO: 168349 - DNA, 15 bp, Homo sapiens
cagacttcatgggtc

SEQ ID NO: 168350 - DNA, 15 bp, Homo sapiens
agacttcatgggtcc

SEQ ID NO: 168351 - DNA, 15 bp, Homo sapiens
gacttcatgggtcca

SEQ ID NO: 168352 - DNA, 15 bp, Homo sapiens
acttcatgggtccag

SEQ ID NO: 168353 - DNA, 15 bp, Homo sapiens
cttcatgggtccagg

SEQ ID NO: 168354 - DNA, 15 bp, Homo sapiens
ttcatgggtccaggt

SEQ ID NO: 168355 - DNA, 15 bp, Homo sapiens
tcatgggtccaggtg

SEQ ID NO: 168356 - DNA, 15 bp, Homo sapiens
catgggtccaggtga

SEQ ID NO: 168357 - DNA, 15 bp, Homo sapiens
atgggtccaggtgag

SEQ ID NO: 168358 - DNA, 15 bp, Homo sapiens
tgggtccaggtgagg

SEQ ID NO: 168359 - DNA, 15 bp, Homo sapiens
gggtccaggtgagga

SEQ ID NO: 168360 - DNA, 15 bp, Homo sapiens
ggtccaggtgaggat

SEQ ID NO: 168361 - DNA, 15 bp, Homo sapiens
gtccaggtgaggatt

SEQ ID NO: 168362 - DNA, 15 bp, Homo sapiens
tccaggtgaggatta

SEQ ID NO: 168363 - DNA, 15 bp, Homo sapiens
ccaggtgaggattaa

SEQ ID NO: 168364 - DNA, 15 bp, Homo sapiens
caggtgaggattaaa

SEQ ID NO: 168365 - DNA, 15 bp, Homo sapiens
aggtgaggattaaag

SEQ ID NO: 168366 - DNA, 15 bp, Homo sapiens
ggtgaggattaaagg

SEQ ID NO: 168367 - DNA, 15 bp, Homo sapiens
gtgaggattaaagga

SEQ ID NO: 168368 - DNA, 15 bp, Homo sapiens
tgaggattaaaggag

SEQ ID NO: 168369 - DNA, 15 bp, Homo sapiens
gaggattaaaggaga

SEQ ID NO: 168370 - DNA, 15 bp, Homo sapiens
aggattaaaggagat

SEQ ID NO: 168371 - DNA, 15 bp, Homo sapiens
ggattaaaggagatc

SEQ ID NO: 168372 - DNA, 15 bp, Homo sapiens
gattaaaggagatca

SEQ ID NO: 168373 - DNA, 15 bp, Homo sapiens
attaaaggagatcat

SEQ ID NO: 168374 - DNA, 15 bp, Homo sapiens
ttaaaggagatcatg

SEQ ID NO: 168375 - DNA, 15 bp, Homo sapiens
taaaggagatcatgt

SEQ ID NO: 168376 - DNA, 15 bp, Homo sapiens
aaaggagatcatgta

SEQ ID NO: 168377 - DNA, 15 bp, Homo sapiens
aaggagatcatgtat

SEQ ID NO: 168378 - DNA, 15 bp, Homo sapiens
aggagatcatgtatt

SEQ ID NO: 168379 - DNA, 15 bp, Homo sapiens
ggagatcatgtattt

SEQ ID NO: 168380 - DNA, 15 bp, Homo sapiens
gagatcatgtattta

SEQ ID NO: 168381 - DNA, 15 bp, Homo sapiens
agatcatgtatttac

SEQ ID NO: 168382 - DNA, 15 bp, Homo sapiens
gatcatgtatttaca

SEQ ID NO: 168383 - DNA, 15 bp, Homo sapiens
atcatgtatttacag

SEQ ID NO: 168384 - DNA, 15 bp, Homo sapiens
tcatgtatttacagc

SEQ ID NO: 168385 - DNA, 15 bp, Homo sapiens
catgtatttacagca

SEQ ID NO: 168386 - DNA, 15 bp, Homo sapiens
atgtatttacagcac

SEQ ID NO: 168387 - DNA, 15 bp, Homo sapiens
tgtatttacagcaca

SEQ ID NO: 168388 - DNA, 15 bp, Homo sapiens
gtatttacagcacat

SEQ ID NO: 168389 - DNA, 15 bp, Homo sapiens
tatttacagcacatg

SEQ ID NO: 168390 - DNA, 15 bp, Homo sapiens
atttacagcacatgg

SEQ ID NO: 168391 - DNA, 15 bp, Homo sapiens
tttacagcacatggc

SEQ ID NO: 168392 - DNA, 15 bp, Homo sapiens
ttacagcacatggca

SEQ ID NO: 168393 - DNA, 15 bp, Homo sapiens
tacagcacatggcat

SEQ ID NO: 168394 - DNA, 15 bp, Homo sapiens
acagcacatggcatg

SEQ ID NO: 168395 - DNA, 15 bp, Homo sapiens
cagcacatggcatgg

SEQ ID NO: 168396 - DNA, 15 bp, Homo sapiens
agcacatggcatggt

SEQ ID NO: 168397 - DNA, 15 bp, Homo sapiens
gcacatggcatggtg

SEQ ID NO: 168398 - DNA, 15 bp, Homo sapiens
cacatggcatggtgc

SEQ ID NO: 168399 - DNA, 15 bp, Homo sapiens
acatggcatggtgct

SEQ ID NO: 168400 - DNA, 15 bp, Homo sapiens
catggcatggtgctt

SEQ ID NO: 168401 - DNA, 15 bp, Homo sapiens
atggcatggtgcttc

SEQ ID NO: 168402 - DNA, 15 bp, Homo sapiens
tggcatggtgcttca

SEQ ID NO: 168403 - DNA, 15 bp, Homo sapiens
ggcatggtgcttcac

SEQ ID NO: 168404 - DNA, 15 bp, Homo sapiens
gcatggtgcttcaca

SEQ ID NO: 168405 - DNA, 15 bp, Homo sapiens
catggtgcttcacat

SEQ ID NO: 168406 - DNA, 15 bp, Homo sapiens
atggtgcttcacata

SEQ ID NO: 168407 - DNA, 15 bp, Homo sapiens
tggtgcttcacataa

SEQ ID NO: 168408 - DNA, 15 bp, Homo sapiens
ggtgcttcacataaa

SEQ ID NO: 168409 - DNA, 15 bp, Homo sapiens
gtgcttcacataaaa

SEQ ID NO: 168410 - DNA, 15 bp, Homo sapiens
tgcttcacataaaat

SEQ ID NO: 168411 - DNA, 15 bp, Homo sapiens
gcttcacataaaata

SEQ ID NO: 168412 - DNA, 15 bp, Homo sapiens
cttcacataaaataa

SEQ ID NO: 168413 - DNA, 15 bp, Homo sapiens
ttcacataaaataag

SEQ ID NO: 168414 - DNA, 15 bp, Homo sapiens
tcacataaaataagt

SEQ ID NO: 168415 - DNA, 15 bp, Homo sapiens
cacataaaataagta

SEQ ID NO: 168416 - DNA, 15 bp, Homo sapiens
acataaaataagtat

SEQ ID NO: 168417 - DNA, 15 bp, Homo sapiens
cataaaataagtatt

SEQ ID NO: 168418 - DNA, 15 bp, Homo sapiens
ataaaataagtattt

SEQ ID NO: 168419 - DNA, 15 bp, Homo sapiens
taaaataagtattta

SEQ ID NO: 168420 - DNA, 15 bp, Homo sapiens
aaaataagtatttag

SEQ ID NO: 168421 - DNA, 15 bp, Homo sapiens
aaataagtatttagt

SEQ ID NO: 168422 - DNA, 15 bp, Homo sapiens
aataagtatttagta

SEQ ID NO: 168423 - DNA, 15 bp, Homo sapiens
ataagtatttagtaa

SEQ ID NO: 168424 - DNA, 15 bp, Homo sapiens
taagtatttagtaaa

SEQ ID NO: 168425 - DNA, 15 bp, Homo sapiens
aagtatttagtaaat

SEQ ID NO: 168426 - DNA, 15 bp, Homo sapiens
agtatttagtaaatg

SEQ ID NO: 168427 - DNA, 15 bp, Homo sapiens
gtatttagtaaatga

SEQ ID NO: 168428 - DNA, 15 bp, Homo sapiens
tatttagtaaatgat

SEQ ID NO: 168429 - DNA, 15 bp, Homo sapiens
atttagtaaatgata

SEQ ID NO: 168430 - DNA, 15 bp, Homo sapiens
tttagtaaatgataa

SEQ ID NO: 168431 - DNA, 15 bp, Homo sapiens
ttagtaaatgataac

SEQ ID NO: 168432 - DNA, 15 bp, Homo sapiens
tagtaaatgataact

SEQ ID NO: 168433 - DNA, 15 bp, Homo sapiens
agtaaatgataactg

SEQ ID NO: 168434 - DNA, 15 bp, Homo sapiens
gtaaatgataactgg

SEQ ID NO: 168435 - DNA, 15 bp, Homo sapiens
taaatgataactggt

SEQ ID NO: 168436 - DNA, 15 bp, Homo sapiens
aaatgataactggtt

SEQ ID NO: 168437 - DNA, 15 bp, Homo sapiens
aatgataactggttc

SEQ ID NO: 168438 - DNA, 15 bp, Homo sapiens
atgataactggttcc

SEQ ID NO: 168439 - DNA, 15 bp, Homo sapiens
tgataactggttcct

SEQ ID NO: 168440 - DNA, 15 bp, Homo sapiens
gataactggttcctt

SEQ ID NO: 168441 - DNA, 15 bp, Homo sapiens
ataactggttccttc

SEQ ID NO: 168442 - DNA, 15 bp, Homo sapiens
taactggttccttct

SEQ ID NO: 168443 - DNA, 15 bp, Homo sapiens
aactggttccttctc

SEQ ID NO: 168444 - DNA, 15 bp, Homo sapiens
actggttccttctct

SEQ ID NO: 168445 - DNA, 15 bp, Homo sapiens
ctggttccttctctc

SEQ ID NO: 168446 - DNA, 15 bp, Homo sapiens
tggttccttctctca

SEQ ID NO: 168447 - DNA, 15 bp, Homo sapiens
ggttccttctctcag

SEQ ID NO: 168448 - DNA, 15 bp, Homo sapiens
gttccttctctcaga

SEQ ID NO: 168449 - DNA, 15 bp, Homo sapiens
ttccttctctcagaa

SEQ ID NO: 168450 - DNA, 15 bp, Homo sapiens
tccttctctcagaaa

SEQ ID NO: 168451 - DNA, 15 bp, Homo sapiens
ccttctctcagaaac

SEQ ID NO: 168452 - DNA, 15 bp, Homo sapiens
cttctctcagaaact

SEQ ID NO: 168453 - DNA, 15 bp, Homo sapiens
ttctctcagaaactt

SEQ ID NO: 168454 - DNA, 15 bp, Homo sapiens
tctctcagaaactta

SEQ ID NO: 168455 - DNA, 15 bp, Homo sapiens
ctctcagaaacttat

SEQ ID NO: 168456 - DNA, 15 bp, Homo sapiens
tctcagaaacttatt

SEQ ID NO: 168457 - DNA, 15 bp, Homo sapiens
ctcagaaacttattt

SEQ ID NO: 168458 - DNA, 15 bp, Homo sapiens
tcagaaacttatttc

SEQ ID NO: 168459 - DNA, 15 bp, Homo sapiens
cagaaacttatttct

SEQ ID NO: 168460 - DNA, 15 bp, Homo sapiens
agaaacttatttctg

SEQ ID NO: 168461 - DNA, 15 bp, Homo sapiens
gaaacttatttctgg

SEQ ID NO: 168462 - DNA, 15 bp, Homo sapiens
aaacttatttctggg

SEQ ID NO: 168463 - DNA, 15 bp, Homo sapiens
aacttatttctgggc

SEQ ID NO: 168464 - DNA, 15 bp, Homo sapiens
acttatttctgggcc

SEQ ID NO: 168465 - DNA, 15 bp, Homo sapiens
cttatttctgggcct

SEQ ID NO: 168466 - DNA, 15 bp, Homo sapiens
ttatttctgggcctg

SEQ ID NO: 168467 - DNA, 15 bp, Homo sapiens
tatttctgggcctgc

SEQ ID NO: 168468 - DNA, 15 bp, Homo sapiens
atttctgggcctgcc

SEQ ID NO: 168469 - DNA, 15 bp, Homo sapiens
tttctgggcctgcca

SEQ ID NO: 168470 - DNA, 15 bp, Homo sapiens
ttctgggcctgccag

SEQ ID NO: 168471 - DNA, 15 bp, Homo sapiens
tctgggcctgccagg

SEQ ID NO: 168472 - DNA, 15 bp, Homo sapiens
ctgggcctgccaggg

SEQ ID NO: 168473 - DNA, 15 bp, Homo sapiens
tgggcctgccagggg

SEQ ID NO: 168474 - DNA, 15 bp, Homo sapiens
gggcctgccaggggc

SEQ ID NO: 168475 - DNA, 15 bp, Homo sapiens
ggcctgccaggggcc

SEQ ID NO: 168476 - DNA, 15 bp, Homo sapiens
gcctgccaggggccg

SEQ ID NO: 168477 - DNA, 15 bp, Homo sapiens
cctgccaggggccgc

SEQ ID NO: 168478 - DNA, 15 bp, Homo sapiens
ctgccaggggccgcc

SEQ ID NO: 168479 - DNA, 15 bp, Homo sapiens
tgccaggggccgccc

SEQ ID NO: 168480 - DNA, 15 bp, Homo sapiens
gccaggggccgccct

SEQ ID NO: 168481 - DNA, 15 bp, Homo sapiens
ccaggggccgccctt

SEQ ID NO: 168482 - DNA, 15 bp, Homo sapiens
caggggccgcccttt

SEQ ID NO: 168483 - DNA, 15 bp, Homo sapiens
aggggccgccctttt

SEQ ID NO: 168484 - DNA, 15 bp, Homo sapiens
ggggccgcccttttt

SEQ ID NO: 168485 - DNA, 15 bp, Homo sapiens
gggccgccctttttc

SEQ ID NO: 168486 - DNA, 15 bp, Homo sapiens
ggccgccctttttca

SEQ ID NO: 168487 - DNA, 15 bp, Homo sapiens
gccgccctttttcat

SEQ ID NO: 168488 - DNA, 15 bp, Homo sapiens
ccgccctttttcatg

SEQ ID NO: 168489 - DNA, 15 bp, Homo sapiens
cgccctttttcatgg

SEQ ID NO: 168490 - DNA, 15 bp, Homo sapiens
gccctttttcatggc

SEQ ID NO: 168491 - DNA, 15 bp, Homo sapiens
ccctttttcatggca

SEQ ID NO: 168492 - DNA, 15 bp, Homo sapiens
cctttttcatggcac

SEQ ID NO: 168493 - DNA, 15 bp, Homo sapiens
ctttttcatggcaca

SEQ ID NO: 168494 - DNA, 15 bp, Homo sapiens
tttttcatggcacaa

SEQ ID NO: 168495 - DNA, 15 bp, Homo sapiens
ttttcatggcacaag

SEQ ID NO: 168496 - DNA, 15 bp, Homo sapiens
tttcatggcacaagt

SEQ ID NO: 168497 - DNA, 15 bp, Homo sapiens
ttcatggcacaagtt

SEQ ID NO: 168498 - DNA, 15 bp, Homo sapiens
tcatggcacaagttg

SEQ ID NO: 168499 - DNA, 15 bp, Homo sapiens
catggcacaagttgg

SEQ ID NO: 168500 - DNA, 15 bp, Homo sapiens
atggcacaagttggg

SEQ ID NO: 168501 - DNA, 15 bp, Homo sapiens
tggcacaagttgggt

SEQ ID NO: 168502 - DNA, 15 bp, Homo sapiens
ggcacaagttgggtt

SEQ ID NO: 168503 - DNA, 15 bp, Homo sapiens
gcacaagttgggttc

SEQ ID NO: 168504 - DNA, 15 bp, Homo sapiens
cacaagttgggttcc

SEQ ID NO: 168505 - DNA, 15 bp, Homo sapiens
acaagttgggttccc

SEQ ID NO: 168506 - DNA, 15 bp, Homo sapiens
caagttgggttccca

SEQ ID NO: 168507 - DNA, 15 bp, Homo sapiens
aagttgggttcccag

SEQ ID NO: 168508 - DNA, 15 bp, Homo sapiens
agttgggttcccagg

SEQ ID NO: 168509 - DNA, 15 bp, Homo sapiens
gttgggttcccaggg

SEQ ID NO: 168510 - DNA, 15 bp, Homo sapiens
ttgggttcccagggt

SEQ ID NO: 168511 - DNA, 15 bp, Homo sapiens
tgggttcccagggtt

SEQ ID NO: 168512 - DNA, 15 bp, Homo sapiens
gggttcccagggttc

SEQ ID NO: 168513 - DNA, 15 bp, Homo sapiens
ggttcccagggttca

SEQ ID NO: 168514 - DNA, 15 bp, Homo sapiens
gttcccagggttcag

SEQ ID NO: 168515 - DNA, 15 bp, Homo sapiens
ttcccagggttcagt

SEQ ID NO: 168516 - DNA, 15 bp, Homo sapiens
tcccagggttcagta

SEQ ID NO: 168517 - DNA, 15 bp, Homo sapiens
cccagggttcagtat

SEQ ID NO: 168518 - DNA, 15 bp, Homo sapiens
ccagggttcagtatt

SEQ ID NO: 168519 - DNA, 15 bp, Homo sapiens
cagggttcagtattc

SEQ ID NO: 168520 - DNA, 15 bp, Homo sapiens
agggttcagtattct

SEQ ID NO: 168521 - DNA, 15 bp, Homo sapiens
gggttcagtattctt

SEQ ID NO: 168522 - DNA, 15 bp, Homo sapiens
ggttcagtattcttt

SEQ ID NO: 168523 - DNA, 15 bp, Homo sapiens
gttcagtattctttt

SEQ ID NO: 168524 - DNA, 15 bp, Homo sapiens
ttcagtattctttta

SEQ ID NO: 168525 - DNA, 15 bp, Homo sapiens
tcagtattcttttaa

SEQ ID NO: 168526 - DNA, 15 bp, Homo sapiens
cagtattcttttaaa

SEQ ID NO: 168527 - DNA, 15 bp, Homo sapiens
agtattcttttaaat

SEQ ID NO: 168528 - DNA, 15 bp, Homo sapiens
gtattcttttaaata

SEQ ID NO: 168529 - DNA, 15 bp, Homo sapiens
tattcttttaaatag

SEQ ID NO: 168530 - DNA, 15 bp, Homo sapiens
attcttttaaatagt

SEQ ID NO: 168531 - DNA, 15 bp, Homo sapiens
ttcttttaaatagtt

SEQ ID NO: 168532 - DNA, 15 bp, Homo sapiens
tcttttaaatagttt

SEQ ID NO: 168533 - DNA, 15 bp, Homo sapiens
cttttaaatagtttt

SEQ ID NO: 168534 - DNA, 15 bp, Homo sapiens
ttttaaatagttttc

SEQ ID NO: 168535 - DNA, 15 bp, Homo sapiens
tttaaatagttttct

SEQ ID NO: 168536 - DNA, 15 bp, Homo sapiens
ttaaatagttttctg

SEQ ID NO: 168537 - DNA, 15 bp, Homo sapiens
taaatagttttctgg

SEQ ID NO: 168538 - DNA, 15 bp, Homo sapiens
aaatagttttctgga

SEQ ID NO: 168539 - DNA, 15 bp, Homo sapiens
aatagttttctggag

SEQ ID NO: 168540 - DNA, 15 bp, Homo sapiens
atagttttctggaga

SEQ ID NO: 168541 - DNA, 15 bp, Homo sapiens
tagttttctggagat

SEQ ID NO: 168542 - DNA, 15 bp, Homo sapiens
agttttctggagatc

SEQ ID NO: 168543 - DNA, 15 bp, Homo sapiens
gttttctggagatcc

SEQ ID NO: 168544 - DNA, 15 bp, Homo sapiens
ttttctggagatcct

SEQ ID NO: 168545 - DNA, 15 bp, Homo sapiens
tttctggagatcctc

SEQ ID NO: 168546 - DNA, 15 bp, Homo sapiens
ttctggagatcctcc

SEQ ID NO: 168547 - DNA, 15 bp, Homo sapiens
tctggagatcctcca

SEQ ID NO: 168548 - DNA, 15 bp, Homo sapiens
ctggagatcctccat

SEQ ID NO: 168549 - DNA, 15 bp, Homo sapiens
tggagatcctccatt

SEQ ID NO: 168550 - DNA, 15 bp, Homo sapiens
ggagatcctccattt

SEQ ID NO: 168551 - DNA, 15 bp, Homo sapiens
gagatcctccatttg

SEQ ID NO: 168552 - DNA, 15 bp, Homo sapiens
agatcctccatttgg

SEQ ID NO: 168553 - DNA, 15 bp, Homo sapiens
gatcctccatttggg

SEQ ID NO: 168554 - DNA, 15 bp, Homo sapiens
atcctccatttgggt

SEQ ID NO: 168555 - DNA, 15 bp, Homo sapiens
tcctccatttgggta

SEQ ID NO: 168556 - DNA, 15 bp, Homo sapiens
cctccatttgggtat

SEQ ID NO: 168557 - DNA, 15 bp, Homo sapiens
ctccatttgggtatt

SEQ ID NO: 168558 - DNA, 15 bp, Homo sapiens
tccatttgggtattt

SEQ ID NO: 168559 - DNA, 15 bp, Homo sapiens
ccatttgggtatttt

SEQ ID NO: 168560 - DNA, 15 bp, Homo sapiens
catttgggtattttt

SEQ ID NO: 168561 - DNA, 15 bp, Homo sapiens
atttgggtatttttt

SEQ ID NO: 168562 - DNA, 15 bp, Homo sapiens
tttgggtattttttc

SEQ ID NO: 168563 - DNA, 15 bp, Homo sapiens
ttgggtattttttcc

SEQ ID NO: 168564 - DNA, 15 bp, Homo sapiens
tgggtattttttcct

SEQ ID NO: 168565 - DNA, 15 bp, Homo sapiens
gggtattttttcctg

SEQ ID NO: 168566 - DNA, 15 bp, Homo sapiens
ggtattttttcctgc

SEQ ID NO: 168567 - DNA, 15 bp, Homo sapiens
gtattttttcctgct

SEQ ID NO: 168568 - DNA, 15 bp, Homo sapiens
tattttttcctgctt

SEQ ID NO: 168569 - DNA, 15 bp, Homo sapiens
attttttcctgcttt

SEQ ID NO: 168570 - DNA, 15 bp, Homo sapiens
ttttttcctgctttc

SEQ ID NO: 168571 - DNA, 15 bp, Homo sapiens
tttttcctgctttca

SEQ ID NO: 168572 - DNA, 15 bp, Homo sapiens
ttttcctgctttcag

SEQ ID NO: 168573 - DNA, 15 bp, Homo sapiens
tttcctgctttcagg

SEQ ID NO: 168574 - DNA, 15 bp, Homo sapiens
ttcctgctttcaggt

SEQ ID NO: 168575 - DNA, 15 bp, Homo sapiens
tcctgctttcaggtt

SEQ ID NO: 168576 - DNA, 15 bp, Homo sapiens
cctgctttcaggttt

SEQ ID NO: 168577 - DNA, 15 bp, Homo sapiens
ctgctttcaggtttg

SEQ ID NO: 168578 - DNA, 15 bp, Homo sapiens
tgctttcaggtttgg

SEQ ID NO: 168579 - DNA, 15 bp, Homo sapiens
gctttcaggtttgga

SEQ ID NO: 168580 - DNA, 15 bp, Homo sapiens
ctttcaggtttggag

SEQ ID NO: 168581 - DNA, 15 bp, Homo sapiens
tttcaggtttggaga

SEQ ID NO: 168582 - DNA, 15 bp, Homo sapiens
ttcaggtttggagat

SEQ ID NO: 168583 - DNA, 15 bp, Homo sapiens
tcaggtttggagatg

SEQ ID NO: 168584 - DNA, 15 bp, Homo sapiens
caggtttggagatgg

SEQ ID NO: 168585 - DNA, 15 bp, Homo sapiens
aggtttggagatggt

SEQ ID NO: 168586 - DNA, 15 bp, Homo sapiens
ggtttggagatggtt

SEQ ID NO: 168587 - DNA, 15 bp, Homo sapiens
gtttggagatggtta

SEQ ID NO: 168588 - DNA, 15 bp, Homo sapiens
tttggagatggttat

SEQ ID NO: 168589 - DNA, 15 bp, Homo sapiens
ttggagatggttata

SEQ ID NO: 168590 - DNA, 15 bp, Homo sapiens
tggagatggttatac

SEQ ID NO: 168591 - DNA, 15 bp, Homo sapiens
ggagatggttataca

SEQ ID NO: 168592 - DNA, 15 bp, Homo sapiens
gagatggttatacaa

SEQ ID NO: 168593 - DNA, 15 bp, Homo sapiens
agatggttatacaat

SEQ ID NO: 168594 - DNA, 15 bp, Homo sapiens
gatggttatacaata

SEQ ID NO: 168595 - DNA, 15 bp, Homo sapiens
atggttatacaatag

SEQ ID NO: 168596 - DNA, 15 bp, Homo sapiens
tggttatacaatagt

SEQ ID NO: 168597 - DNA, 15 bp, Homo sapiens
ggttatacaatagtt

SEQ ID NO: 168598 - DNA, 15 bp, Homo sapiens
gttatacaatagttg

SEQ ID NO: 168599 - DNA, 15 bp, Homo sapiens
ttatacaatagttgt

SEQ ID NO: 168600 - DNA, 15 bp, Homo sapiens
tatacaatagttgta

SEQ ID NO: 168601 - DNA, 15 bp, Homo sapiens
atacaatagttgtac

SEQ ID NO: 168602 - DNA, 15 bp, Homo sapiens
tacaatagttgtacg

SEQ ID NO: 168603 - DNA, 15 bp, Homo sapiens
acaatagttgtacga

SEQ ID NO: 168604 - DNA, 15 bp, Homo sapiens
caatagttgtacgaa

SEQ ID NO: 168605 - DNA, 15 bp, Homo sapiens
aatagttgtacgaat

SEQ ID NO: 168606 - DNA, 15 bp, Homo sapiens
atagttgtacgaata

SEQ ID NO: 168607 - DNA, 15 bp, Homo sapiens
tagttgtacgaatag

SEQ ID NO: 168608 - DNA, 15 bp, Homo sapiens
agttgtacgaatagc

SEQ ID NO: 168609 - DNA, 15 bp, Homo sapiens
gttgtacgaatagca

SEQ ID NO: 168610 - DNA, 15 bp, Homo sapiens
ttgtacgaatagcag

SEQ ID NO: 168611 - DNA, 15 bp, Homo sapiens
tgtacgaatagcagg

SEQ ID NO: 168612 - DNA, 15 bp, Homo sapiens
gtacgaatagcaggg

SEQ ID NO: 168613 - DNA, 15 bp, Homo sapiens
tacgaatagcagggt

SEQ ID NO: 168614 - DNA, 15 bp, Homo sapiens
acgaatagcagggtc

SEQ ID NO: 168615 - DNA, 15 bp, Homo sapiens
cgaatagcagggtcc

SEQ ID NO: 168616 - DNA, 15 bp, Homo sapiens
gaatagcagggtcca

SEQ ID NO: 168617 - DNA, 15 bp, Homo sapiens
aatagcagggtccaa

SEQ ID NO: 168618 - DNA, 15 bp, Homo sapiens
atagcagggtccaac

SEQ ID NO: 168619 - DNA, 15 bp, Homo sapiens
tagcagggtccaacc

SEQ ID NO: 168620 - DNA, 15 bp, Homo sapiens
agcagggtccaaccc

SEQ ID NO: 168621 - DNA, 15 bp, Homo sapiens
gcagggtccaacccg

SEQ ID NO: 168622 - DNA, 15 bp, Homo sapiens
cagggtccaacccgg

SEQ ID NO: 168623 - DNA, 15 bp, Homo sapiens
agggtccaacccgga

SEQ ID NO: 168624 - DNA, 15 bp, Homo sapiens
gggtccaacccggac

SEQ ID NO: 168625 - DNA, 15 bp, Homo sapiens
ggtccaacccggacc

SEQ ID NO: 168626 - DNA, 15 bp, Homo sapiens
gtccaacccggacct

SEQ ID NO: 168627 - DNA, 15 bp, Homo sapiens
tccaacccggacctg

SEQ ID NO: 168628 - DNA, 15 bp, Homo sapiens
ccaacccggacctga

SEQ ID NO: 168629 - DNA, 15 bp, Homo sapiens
caacccggacctgaa

SEQ ID NO: 168630 - DNA, 15 bp, Homo sapiens
aacccggacctgaag

SEQ ID NO: 168631 - DNA, 15 bp, Homo sapiens
acccggacctgaagc

SEQ ID NO: 168632 - DNA, 15 bp, Homo sapiens
cccggacctgaagcc

SEQ ID NO: 168633 - DNA, 15 bp, Homo sapiens
ccggacctgaagcct

SEQ ID NO: 168634 - DNA, 15 bp, Homo sapiens
cggacctgaagcctg

SEQ ID NO: 168635 - DNA, 15 bp, Homo sapiens
ggacctgaagcctgt

SEQ ID NO: 168636 - DNA, 15 bp, Homo sapiens
gacctgaagcctgtc

SEQ ID NO: 168637 - DNA, 15 bp, Homo sapiens
acctgaagcctgtcc

SEQ ID NO: 168638 - DNA, 15 bp, Homo sapiens
cctgaagcctgtcca

SEQ ID NO: 168639 - DNA, 15 bp, Homo sapiens
ctgaagcctgtccag

SEQ ID NO: 168640 - DNA, 15 bp, Homo sapiens
tgaagcctgtccagg

SEQ ID NO: 168641 - DNA, 15 bp, Homo sapiens
gaagcctgtccagga

SEQ ID NO: 168642 - DNA, 15 bp, Homo sapiens
aagcctgtccaggat

SEQ ID NO: 168643 - DNA, 15 bp, Homo sapiens
agcctgtccaggatt

SEQ ID NO: 168644 - DNA, 15 bp, Homo sapiens
gcctgtccaggattt

SEQ ID NO: 168645 - DNA, 15 bp, Homo sapiens
cctgtccaggatttc

SEQ ID NO: 168646 - DNA, 15 bp, Homo sapiens
ctgtccaggatttct

SEQ ID NO: 168647 - DNA, 15 bp, Homo sapiens
tgtccaggatttctt

SEQ ID NO: 168648 - DNA, 15 bp, Homo sapiens
gtccaggatttcttt

SEQ ID NO: 168649 - DNA, 15 bp, Homo sapiens
tccaggatttctttg

SEQ ID NO: 168650 - DNA, 15 bp, Homo sapiens
ccaggatttctttgg

SEQ ID NO: 168651 - DNA, 15 bp, Homo sapiens
caggatttctttgga

SEQ ID NO: 168652 - DNA, 15 bp, Homo sapiens
aggatttctttggac

SEQ ID NO: 168653 - DNA, 15 bp, Homo sapiens
ggatttctttggact

SEQ ID NO: 168654 - DNA, 15 bp, Homo sapiens
gatttctttggactt

SEQ ID NO: 168655 - DNA, 15 bp, Homo sapiens
atttctttggacttg

SEQ ID NO: 168656 - DNA, 15 bp, Homo sapiens
tttctttggacttgc

SEQ ID NO: 168657 - DNA, 15 bp, Homo sapiens
ttctttggacttgca

SEQ ID NO: 168658 - DNA, 15 bp, Homo sapiens
tctttggacttgcat

SEQ ID NO: 168659 - DNA, 15 bp, Homo sapiens
ctttggacttgcatt

SEQ ID NO: 168660 - DNA, 15 bp, Homo sapiens
tttggacttgcattt

SEQ ID NO: 168661 - DNA, 15 bp, Homo sapiens
ttggacttgcatttc

SEQ ID NO: 168662 - DNA, 15 bp, Homo sapiens
tggacttgcatttcc

SEQ ID NO: 168663 - DNA, 15 bp, Homo sapiens
ggacttgcatttcct

SEQ ID NO: 168664 - DNA, 15 bp, Homo sapiens
gacttgcatttcctg

SEQ ID NO: 168665 - DNA, 15 bp, Homo sapiens
acttgcatttcctgg

SEQ ID NO: 168666 - DNA, 15 bp, Homo sapiens
cttgcatttcctgga

SEQ ID NO: 168667 - DNA, 15 bp, Homo sapiens
ttgcatttcctggaa

SEQ ID NO: 168668 - DNA, 15 bp, Homo sapiens
tgcatttcctggaag

SEQ ID NO: 168669 - DNA, 15 bp, Homo sapiens
gcatttcctggaagt

SEQ ID NO: 168670 - DNA, 15 bp, Homo sapiens
catttcctggaagtg

SEQ ID NO: 168671 - DNA, 15 bp, Homo sapiens
atttcctggaagtgt

SEQ ID NO: 168672 - DNA, 15 bp, Homo sapiens
tttcctggaagtgtt

SEQ ID NO: 168673 - DNA, 15 bp, Homo sapiens
ttcctggaagtgttc

SEQ ID NO: 168674 - DNA, 15 bp, Homo sapiens
tcctggaagtgttct

SEQ ID NO: 168675 - DNA, 15 bp, Homo sapiens
cctggaagtgttcta

SEQ ID NO: 168676 - DNA, 15 bp, Homo sapiens
ctggaagtgttctaa

SEQ ID NO: 168677 - DNA, 15 bp, Homo sapiens
tggaagtgttctaaa

SEQ ID NO: 168678 - DNA, 15 bp, Homo sapiens
ggaagtgttctaaaa

SEQ ID NO: 168679 - DNA, 15 bp, Homo sapiens
gaagtgttctaaaag

SEQ ID NO: 168680 - DNA, 15 bp, Homo sapiens
aagtgttctaaaaga

SEQ ID NO: 168681 - DNA, 15 bp, Homo sapiens
agtgttctaaaagag

SEQ ID NO: 168682 - DNA, 15 bp, Homo sapiens
gtgttctaaaagaga

SEQ ID NO: 168683 - DNA, 15 bp, Homo sapiens
tgttctaaaagagaa

SEQ ID NO: 168684 - DNA, 15 bp, Homo sapiens
gttctaaaagagaaa

SEQ ID NO: 168685 - DNA, 15 bp, Homo sapiens
ttctaaaagagaaac

SEQ ID NO: 168686 - DNA, 15 bp, Homo sapiens
tctaaaagagaaaca

SEQ ID NO: 168687 - DNA, 15 bp, Homo sapiens
ctaaaagagaaacac

SEQ ID NO: 168688 - DNA, 15 bp, Homo sapiens
taaaagagaaacacc

SEQ ID NO: 168689 - DNA, 15 bp, Homo sapiens
aaaagagaaacaccg

SEQ ID NO: 168690 - DNA, 15 bp, Homo sapiens
aaagagaaacaccgg

SEQ ID NO: 168691 - DNA, 15 bp, Homo sapiens
aagagaaacaccgga

SEQ ID NO: 168692 - DNA, 15 bp, Homo sapiens
agagaaacaccggaa

SEQ ID NO: 168693 - DNA, 15 bp, Homo sapiens
gagaaacaccggaac

SEQ ID NO: 168694 - DNA, 15 bp, Homo sapiens
agaaacaccggaaca

SEQ ID NO: 168695 - DNA, 15 bp, Homo sapiens
gaaacaccggaacat

SEQ ID NO: 168696 - DNA, 15 bp, Homo sapiens
aaacaccggaacatg

SEQ ID NO: 168697 - DNA, 15 bp, Homo sapiens
aacaccggaacatgc

SEQ ID NO: 168698 - DNA, 15 bp, Homo sapiens
acaccggaacatgct

SEQ ID NO: 168699 - DNA, 15 bp, Homo sapiens
caccggaacatgcta

SEQ ID NO: 168700 - DNA, 15 bp, Homo sapiens
accggaacatgctac

SEQ ID NO: 168701 - DNA, 15 bp, Homo sapiens
ccggaacatgctaca

SEQ ID NO: 168702 - DNA, 15 bp, Homo sapiens
cggaacatgctacaa

SEQ ID NO: 168703 - DNA, 15 bp, Homo sapiens
ggaacatgctacaat

SEQ ID NO: 168704 - DNA, 15 bp, Homo sapiens
gaacatgctacaata

SEQ ID NO: 168705 - DNA, 15 bp, Homo sapiens
aacatgctacaatac

SEQ ID NO: 168706 - DNA, 15 bp, Homo sapiens
acatgctacaatacc

SEQ ID NO: 168707 - DNA, 15 bp, Homo sapiens
catgctacaatacca

SEQ ID NO: 168708 - DNA, 15 bp, Homo sapiens
atgctacaataccag

SEQ ID NO: 168709 - DNA, 15 bp, Homo sapiens
tgctacaataccagc

SEQ ID NO: 168710 - DNA, 15 bp, Homo sapiens
gctacaataccagct

SEQ ID NO: 168711 - DNA, 15 bp, Homo sapiens
ctacaataccagctt

SEQ ID NO: 168712 - DNA, 15 bp, Homo sapiens
tacaataccagcttc

SEQ ID NO: 168713 - DNA, 15 bp, Homo sapiens
acaataccagcttcc

SEQ ID NO: 168714 - DNA, 15 bp, Homo sapiens
caataccagcttcca

SEQ ID NO: 168715 - DNA, 15 bp, Homo sapiens
aataccagcttccat

SEQ ID NO: 168716 - DNA, 15 bp, Homo sapiens
ataccagcttccatc

SEQ ID NO: 168717 - DNA, 15 bp, Homo sapiens
taccagcttccatct

SEQ ID NO: 168718 - DNA, 15 bp, Homo sapiens
accagcttccatctt

SEQ ID NO: 168719 - DNA, 15 bp, Homo sapiens
ccagcttccatcttc

SEQ ID NO: 168720 - DNA, 15 bp, Homo sapiens
cagcttccatcttca

SEQ ID NO: 168721 - DNA, 15 bp, Homo sapiens
agcttccatcttcat

SEQ ID NO: 168722 - DNA, 15 bp, Homo sapiens
gcttccatcttcatt

SEQ ID NO: 168723 - DNA, 15 bp, Homo sapiens
cttccatcttcatta

SEQ ID NO: 168724 - DNA, 15 bp, Homo sapiens
ttccatcttcattat

SEQ ID NO: 168725 - DNA, 15 bp, Homo sapiens
tccatcttcattatc

SEQ ID NO: 168726 - DNA, 15 bp, Homo sapiens
ccatcttcattatct

SEQ ID NO: 168727 - DNA, 15 bp, Homo sapiens
catcttcattatctt

SEQ ID NO: 168728 - DNA, 15 bp, Homo sapiens
atcttcattatcttc

SEQ ID NO: 168729 - DNA, 15 bp, Homo sapiens
tcttcattatcttct

SEQ ID NO: 168730 - DNA, 15 bp, Homo sapiens
cttcattatcttctc

SEQ ID NO: 168731 - DNA, 15 bp, Homo sapiens
ttcattatcttctct

SEQ ID NO: 168732 - DNA, 15 bp, Homo sapiens
tcattatcttctctg

SEQ ID NO: 168733 - DNA, 15 bp, Homo sapiens
cattatcttctctgg

SEQ ID NO: 168734 - DNA, 15 bp, Homo sapiens
attatcttctctggc

SEQ ID NO: 168735 - DNA, 15 bp, Homo sapiens
ttatcttctctggcc

SEQ ID NO: 168736 - DNA, 15 bp, Homo sapiens
tatcttctctggcca

SEQ ID NO: 168737 - DNA, 15 bp, Homo sapiens
atcttctctggccag

SEQ ID NO: 168738 - DNA, 15 bp, Homo sapiens
tcttctctggccagg

SEQ ID NO: 168739 - DNA, 15 bp, Homo sapiens
cttctctggccagga

SEQ ID NO: 168740 - DNA, 15 bp, Homo sapiens
ttctctggccaggat

SEQ ID NO: 168741 - DNA, 15 bp, Homo sapiens
tctctggccaggata

SEQ ID NO: 168742 - DNA, 15 bp, Homo sapiens
ctctggccaggatat

SEQ ID NO: 168743 - DNA, 15 bp, Homo sapiens
tctggccaggatatt

SEQ ID NO: 168744 - DNA, 15 bp, Homo sapiens
ctggccaggatattc

SEQ ID NO: 168745 - DNA, 15 bp, Homo sapiens
tggccaggatattca

SEQ ID NO: 168746 - DNA, 15 bp, Homo sapiens
ggccaggatattcag

SEQ ID NO: 168747 - DNA, 15 bp, Homo sapiens
gccaggatattcagc

SEQ ID NO: 168748 - DNA, 15 bp, Homo sapiens
ccaggatattcagca

SEQ ID NO: 168749 - DNA, 15 bp, Homo sapiens
caggatattcagcat

SEQ ID NO: 168750 - DNA, 15 bp, Homo sapiens
aggatattcagcatc

SEQ ID NO: 168751 - DNA, 15 bp, Homo sapiens
ggatattcagcatcc

SEQ ID NO: 168752 - DNA, 15 bp, Homo sapiens
gatattcagcatcct

SEQ ID NO: 168753 - DNA, 15 bp, Homo sapiens
atattcagcatcctc

SEQ ID NO: 168754 - DNA, 15 bp, Homo sapiens
tattcagcatcctct

SEQ ID NO: 168755 - DNA, 15 bp, Homo sapiens
attcagcatcctctc

SEQ ID NO: 168756 - DNA, 15 bp, Homo sapiens
ttcagcatcctctcc

SEQ ID NO: 168757 - DNA, 15 bp, Homo sapiens
tcagcatcctctccc

SEQ ID NO: 168758 - DNA, 15 bp, Homo sapiens
cagcatcctctccca

SEQ ID NO: 168759 - DNA, 15 bp, Homo sapiens
agcatcctctcccag

SEQ ID NO: 168760 - DNA, 15 bp, Homo sapiens
gcatcctctcccaga

SEQ ID NO: 168761 - DNA, 15 bp, Homo sapiens
catcctctcccagag

SEQ ID NO: 168762 - DNA, 15 bp, Homo sapiens
atcctctcccagagc

SEQ ID NO: 168763 - DNA, 15 bp, Homo sapiens
tcctctcccagagca

SEQ ID NO: 168764 - DNA, 15 bp, Homo sapiens
cctctcccagagcaa

SEQ ID NO: 168765 - DNA, 15 bp, Homo sapiens
ctctcccagagcaaa

SEQ ID NO: 168766 - DNA, 15 bp, Homo sapiens
tctcccagagcaaaa

SEQ ID NO: 168767 - DNA, 15 bp, Homo sapiens
ctcccagagcaaaaa

SEQ ID NO: 168768 - DNA, 15 bp, Homo sapiens
tcccagagcaaaaag

SEQ ID NO: 168769 - DNA, 15 bp, Homo sapiens
cccagagcaaaaagc

SEQ ID NO: 168770 - DNA, 15 bp, Homo sapiens
ccagagcaaaaagcg

SEQ ID NO: 168771 - DNA, 15 bp, Homo sapiens
cagagcaaaaagcga

SEQ ID NO: 168772 - DNA, 15 bp, Homo sapiens
agagcaaaaagcgac

SEQ ID NO: 168773 - DNA, 15 bp, Homo sapiens
gagcaaaaagcgact

SEQ ID NO: 168774 - DNA, 15 bp, Homo sapiens
agcaaaaagcgactc

SEQ ID NO: 168775 - DNA, 15 bp, Homo sapiens
gcaaaaagcgactcc

SEQ ID NO: 168776 - DNA, 15 bp, Homo sapiens
caaaaagcgactcca

SEQ ID NO: 168777 - DNA, 15 bp, Homo sapiens
aaaaagcgactccac

SEQ ID NO: 168778 - DNA, 15 bp, Homo sapiens
aaaagcgactccaca

SEQ ID NO: 168779 - DNA, 15 bp, Homo sapiens
aaagcgactccacat

SEQ ID NO: 168780 - DNA, 15 bp, Homo sapiens
aagcgactccacata

SEQ ID NO: 168781 - DNA, 15 bp, Homo sapiens
agcgactccacatag

SEQ ID NO: 168782 - DNA, 15 bp, Homo sapiens
gcgactccacataga

SEQ ID NO: 168783 - DNA, 15 bp, Homo sapiens
cgactccacatagaa

SEQ ID NO: 168784 - DNA, 15 bp, Homo sapiens
gactccacatagaag

SEQ ID NO: 168785 - DNA, 15 bp, Homo sapiens
actccacatagaaga

SEQ ID NO: 168786 - DNA, 15 bp, Homo sapiens
ctccacatagaagac

SEQ ID NO: 168787 - DNA, 15 bp, Homo sapiens
tccacatagaagact

SEQ ID NO: 168788 - DNA, 15 bp, Homo sapiens
ccacatagaagacta

SEQ ID NO: 168789 - DNA, 15 bp, Homo sapiens
cacatagaagactac

SEQ ID NO: 168790 - DNA, 15 bp, Homo sapiens
acatagaagactact

SEQ ID NO: 168791 - DNA, 15 bp, Homo sapiens
catagaagactactc

SEQ ID NO: 168792 - DNA, 15 bp, Homo sapiens
atagaagactactct

SEQ ID NO: 168793 - DNA, 15 bp, Homo sapiens
tagaagactactctg

SEQ ID NO: 168794 - DNA, 15 bp, Homo sapiens
agaagactactctgt

SEQ ID NO: 168795 - DNA, 15 bp, Homo sapiens
gaagactactctgtt

SEQ ID NO: 168796 - DNA, 15 bp, Homo sapiens
aagactactctgttt

SEQ ID NO: 168797 - DNA, 15 bp, Homo sapiens
agactactctgtttc

SEQ ID NO: 168798 - DNA, 15 bp, Homo sapiens
gactactctgtttct

SEQ ID NO: 168799 - DNA, 15 bp, Homo sapiens
actactctgtttctc

SEQ ID NO: 168800 - DNA, 15 bp, Homo sapiens
ctactctgtttctca

SEQ ID NO: 168801 - DNA, 15 bp, Homo sapiens
tactctgtttctcag

SEQ ID NO: 168802 - DNA, 15 bp, Homo sapiens
actctgtttctcaga

SEQ ID NO: 168803 - DNA, 15 bp, Homo sapiens
ctctgtttctcagac

SEQ ID NO: 168804 - DNA, 15 bp, Homo sapiens
tctgtttctcagaca

SEQ ID NO: 168805 - DNA, 15 bp, Homo sapiens
ctgtttctcagacaa

SEQ ID NO: 168806 - DNA, 15 bp, Homo sapiens
tgtttctcagacaac

SEQ ID NO: 168807 - DNA, 15 bp, Homo sapiens
gtttctcagacaaca

SEQ ID NO: 168808 - DNA, 15 bp, Homo sapiens
tttctcagacaacac

SEQ ID NO: 168809 - DNA, 15 bp, Homo sapiens
ttctcagacaacact

SEQ ID NO: 168810 - DNA, 15 bp, Homo sapiens
tctcagacaacactt

SEQ ID NO: 168811 - DNA, 15 bp, Homo sapiens
ctcagacaacacttg

SEQ ID NO: 168812 - DNA, 15 bp, Homo sapiens
tcagacaacacttga

SEQ ID NO: 168813 - DNA, 15 bp, Homo sapiens
cagacaacacttgac

SEQ ID NO: 168814 - DNA, 15 bp, Homo sapiens
agacaacacttgacc

SEQ ID NO: 168815 - DNA, 15 bp, Homo sapiens
gacaacacttgacca

SEQ ID NO: 168816 - DNA, 15 bp, Homo sapiens
acaacacttgaccaa

SEQ ID NO: 168817 - DNA, 15 bp, Homo sapiens
caacacttgaccaag

SEQ ID NO: 168818 - DNA, 15 bp, Homo sapiens
aacacttgaccaagt

SEQ ID NO: 168819 - DNA, 15 bp, Homo sapiens
acacttgaccaagta

SEQ ID NO: 168820 - DNA, 15 bp, Homo sapiens
cacttgaccaagtaa

SEQ ID NO: 168821 - DNA, 15 bp, Homo sapiens
acttgaccaagtaag

SEQ ID NO: 168822 - DNA, 15 bp, Homo sapiens
cttgaccaagtaagc

SEQ ID NO: 168823 - DNA, 15 bp, Homo sapiens
ttgaccaagtaagct

SEQ ID NO: 168824 - DNA, 15 bp, Homo sapiens
tgaccaagtaagctt

SEQ ID NO: 168825 - DNA, 15 bp, Homo sapiens
gaccaagtaagcttt

SEQ ID NO: 168826 - DNA, 15 bp, Homo sapiens
accaagtaagctttg

SEQ ID NO: 168827 - DNA, 15 bp, Homo sapiens
ccaagtaagctttga

SEQ ID NO: 168828 - DNA, 15 bp, Homo sapiens
caagtaagctttgag

SEQ ID NO: 168829 - DNA, 15 bp, Homo sapiens
aagtaagctttgagt

SEQ ID NO: 168830 - DNA, 15 bp, Homo sapiens
agtaagctttgagtg

SEQ ID NO: 168831 - DNA, 15 bp, Homo sapiens
gtaagctttgagtgt

SEQ ID NO: 168832 - DNA, 15 bp, Homo sapiens
taagctttgagtgtc

SEQ ID NO: 168833 - DNA, 15 bp, Homo sapiens
aagctttgagtgtca

SEQ ID NO: 168834 - DNA, 15 bp, Homo sapiens
agctttgagtgtcaa

SEQ ID NO: 168835 - DNA, 15 bp, Homo sapiens
gctttgagtgtcaaa

SEQ ID NO: 168836 - DNA, 15 bp, Homo sapiens
ctttgagtgtcaaaa

SEQ ID NO: 168837 - DNA, 15 bp, Homo sapiens
tttgagtgtcaaaac

SEQ ID NO: 168838 - DNA, 15 bp, Homo sapiens
ttgagtgtcaaaaca

SEQ ID NO: 168839 - DNA, 15 bp, Homo sapiens
tgagtgtcaaaacag

SEQ ID NO: 168840 - DNA, 15 bp, Homo sapiens
gagtgtcaaaacaga

SEQ ID NO: 168841 - DNA, 15 bp, Homo sapiens
agtgtcaaaacagat

SEQ ID NO: 168842 - DNA, 15 bp, Homo sapiens
gtgtcaaaacagatt

SEQ ID NO: 168843 - DNA, 15 bp, Homo sapiens
tgtcaaaacagattt

SEQ ID NO: 168844 - DNA, 15 bp, Homo sapiens
gtcaaaacagattta

SEQ ID NO: 168845 - DNA, 15 bp, Homo sapiens
tcaaaacagatttac

SEQ ID NO: 168846 - DNA, 15 bp, Homo sapiens
caaaacagatttact

SEQ ID NO: 168847 - DNA, 15 bp, Homo sapiens
aaaacagatttactt

SEQ ID NO: 168848 - DNA, 15 bp, Homo sapiens
aaacagatttacttc

SEQ ID NO: 168849 - DNA, 15 bp, Homo sapiens
aacagatttacttct

SEQ ID NO: 168850 - DNA, 15 bp, Homo sapiens
acagatttacttctc

SEQ ID NO: 168851 - DNA, 15 bp, Homo sapiens
cagatttacttctca

SEQ ID NO: 168852 - DNA, 15 bp, Homo sapiens
agatttacttctcag

SEQ ID NO: 168853 - DNA, 15 bp, Homo sapiens
gatttacttctcagg

SEQ ID NO: 168854 - DNA, 15 bp, Homo sapiens
atttacttctcaggg

SEQ ID NO: 168855 - DNA, 15 bp, Homo sapiens
tttacttctcagggt

SEQ ID NO: 168856 - DNA, 15 bp, Homo sapiens
ttacttctcagggtg

SEQ ID NO: 168857 - DNA, 15 bp, Homo sapiens
tacttctcagggtgt

SEQ ID NO: 168858 - DNA, 15 bp, Homo sapiens
acttctcagggtgtg

SEQ ID NO: 168859 - DNA, 15 bp, Homo sapiens
cttctcagggtgtgg

SEQ ID NO: 168860 - DNA, 15 bp, Homo sapiens
ttctcagggtgtgga

SEQ ID NO: 168861 - DNA, 15 bp, Homo sapiens
tctcagggtgtggat

SEQ ID NO: 168862 - DNA, 15 bp, Homo sapiens
ctcagggtgtggatt

SEQ ID NO: 168863 - DNA, 15 bp, Homo sapiens
tcagggtgtggattc

SEQ ID NO: 168864 - DNA, 15 bp, Homo sapiens
cagggtgtggattcc

SEQ ID NO: 168865 - DNA, 15 bp, Homo sapiens
agggtgtggattcct

SEQ ID NO: 168866 - DNA, 15 bp, Homo sapiens
gggtgtggattcctg

SEQ ID NO: 168867 - DNA, 15 bp, Homo sapiens
ggtgtggattcctgc

SEQ ID NO: 168868 - DNA, 15 bp, Homo sapiens
gtgtggattcctgcc

SEQ ID NO: 168869 - DNA, 15 bp, Homo sapiens
tgtggattcctgccc

SEQ ID NO: 168870 - DNA, 15 bp, Homo sapiens
gtggattcctgcccc

SEQ ID NO: 168871 - DNA, 15 bp, Homo sapiens
tggattcctgccccg

SEQ ID NO: 168872 - DNA, 15 bp, Homo sapiens
ggattcctgccccga

SEQ ID NO: 168873 - DNA, 15 bp, Homo sapiens
gattcctgccccgac

SEQ ID NO: 168874 - DNA, 15 bp, Homo sapiens
attcctgccccgaca

SEQ ID NO: 168875 - DNA, 15 bp, Homo sapiens
ttcctgccccgacac

SEQ ID NO: 168876 - DNA, 15 bp, Homo sapiens
tcctgccccgacact

SEQ ID NO: 168877 - DNA, 15 bp, Homo sapiens
cctgccccgacactc

SEQ ID NO: 168878 - DNA, 15 bp, Homo sapiens
ctgccccgacactcc

SEQ ID NO: 168879 - DNA, 15 bp, Homo sapiens
tgccccgacactccc

SEQ ID NO: 168880 - DNA, 15 bp, Homo sapiens
gccccgacactcccg

SEQ ID NO: 168881 - DNA, 15 bp, Homo sapiens
ccccgacactcccgc

SEQ ID NO: 168882 - DNA, 15 bp, Homo sapiens
cccgacactcccgcc

SEQ ID NO: 168883 - DNA, 15 bp, Homo sapiens
ccgacactcccgccc

SEQ ID NO: 168884 - DNA, 15 bp, Homo sapiens
cgacactcccgccca

SEQ ID NO: 168885 - DNA, 15 bp, Homo sapiens
gacactcccgcccat

SEQ ID NO: 168886 - DNA, 15 bp, Homo sapiens
acactcccgcccata

SEQ ID NO: 168887 - DNA, 15 bp, Homo sapiens
cactcccgcccatag

SEQ ID NO: 168888 - DNA, 15 bp, Homo sapiens
actcccgcccatagg

SEQ ID NO: 168889 - DNA, 15 bp, Homo sapiens
ctcccgcccataggt

SEQ ID NO: 168890 - DNA, 15 bp, Homo sapiens
tcccgcccataggtc

SEQ ID NO: 168891 - DNA, 15 bp, Homo sapiens
cccgcccataggtcc

SEQ ID NO: 168892 - DNA, 15 bp, Homo sapiens
ccgcccataggtcca

SEQ ID NO: 168893 - DNA, 15 bp, Homo sapiens
cgcccataggtccaa

SEQ ID NO: 168894 - DNA, 15 bp, Homo sapiens
gcccataggtccaag

SEQ ID NO: 168895 - DNA, 15 bp, Homo sapiens
cccataggtccaaga

SEQ ID NO: 168896 - DNA, 15 bp, Homo sapiens
ccataggtccaagag

SEQ ID NO: 168897 - DNA, 15 bp, Homo sapiens
cataggtccaagagc

SEQ ID NO: 168898 - DNA, 15 bp, Homo sapiens
ataggtccaagagca

SEQ ID NO: 168899 - DNA, 15 bp, Homo sapiens
taggtccaagagcag

SEQ ID NO: 168900 - DNA, 15 bp, Homo sapiens
aggtccaagagcagt

SEQ ID NO: 168901 - DNA, 15 bp, Homo sapiens
ggtccaagagcagtt

SEQ ID NO: 168902 - DNA, 15 bp, Homo sapiens
gtccaagagcagttt

SEQ ID NO: 168903 - DNA, 15 bp, Homo sapiens
tccaagagcagtttg

SEQ ID NO: 168904 - DNA, 15 bp, Homo sapiens
ccaagagcagtttgt

SEQ ID NO: 168905 - DNA, 15 bp, Homo sapiens
caagagcagtttgta

SEQ ID NO: 168906 - DNA, 15 bp, Homo sapiens
aagagcagtttgtat

SEQ ID NO: 168907 - DNA, 15 bp, Homo sapiens
agagcagtttgtatc

SEQ ID NO: 168908 - DNA, 15 bp, Homo sapiens
gagcagtttgtatct

SEQ ID NO: 168909 - DNA, 15 bp, Homo sapiens
agcagtttgtatctt

SEQ ID NO: 168910 - DNA, 15 bp, Homo sapiens
gcagtttgtatcttg

SEQ ID NO: 168911 - DNA, 15 bp, Homo sapiens
cagtttgtatcttga

SEQ ID NO: 168912 - DNA, 15 bp, Homo sapiens
agtttgtatcttgaa

SEQ ID NO: 168913 - DNA, 15 bp, Homo sapiens
gtttgtatcttgaat

SEQ ID NO: 168914 - DNA, 15 bp, Homo sapiens
tttgtatcttgaatt

SEQ ID NO: 168915 - DNA, 15 bp, Homo sapiens
ttgtatcttgaattg

SEQ ID NO: 168916 - DNA, 15 bp, Homo sapiens
tgtatcttgaattgg

SEQ ID NO: 168917 - DNA, 15 bp, Homo sapiens
gtatcttgaattggt

SEQ ID NO: 168918 - DNA, 15 bp, Homo sapiens
tatcttgaattggtg

SEQ ID NO: 168919 - DNA, 15 bp, Homo sapiens
atcttgaattggtgc

SEQ ID NO: 168920 - DNA, 15 bp, Homo sapiens
tcttgaattggtgct

SEQ ID NO: 168921 - DNA, 15 bp, Homo sapiens
cttgaattggtgctt

SEQ ID NO: 168922 - DNA, 15 bp, Homo sapiens
ttgaattggtgcttg

SEQ ID NO: 168923 - DNA, 15 bp, Homo sapiens
tgaattggtgcttga

SEQ ID NO: 168924 - DNA, 15 bp, Homo sapiens
gaattggtgcttgaa

SEQ ID NO: 168925 - DNA, 15 bp, Homo sapiens
aattggtgcttgaat

SEQ ID NO: 168926 - DNA, 15 bp, Homo sapiens
attggtgcttgaatt

SEQ ID NO: 168927 - DNA, 15 bp, Homo sapiens
ttggtgcttgaattc

SEQ ID NO: 168928 - DNA, 15 bp, Homo sapiens
tggtgcttgaattcc

SEQ ID NO: 168929 - DNA, 15 bp, Homo sapiens
ggtgcttgaattcct

SEQ ID NO: 168930 - DNA, 15 bp, Homo sapiens
gtgcttgaattcctg

SEQ ID NO: 168931 - DNA, 15 bp, Homo sapiens
tgcttgaattcctga

SEQ ID NO: 168932 - DNA, 15 bp, Homo sapiens
gcttgaattcctgat

SEQ ID NO: 168933 - DNA, 15 bp, Homo sapiens
cttgaattcctgatc

SEQ ID NO: 168934 - DNA, 15 bp, Homo sapiens
ttgaattcctgatct

SEQ ID NO: 168935 - DNA, 15 bp, Homo sapiens
tgaattcctgatcta

SEQ ID NO: 168936 - DNA, 15 bp, Homo sapiens
gaattcctgatctac

SEQ ID NO: 168937 - DNA, 15 bp, Homo sapiens
aattcctgatctact

SEQ ID NO: 168938 - DNA, 15 bp, Homo sapiens
attcctgatctacta

SEQ ID NO: 168939 - DNA, 15 bp, Homo sapiens
ttcctgatctactat

SEQ ID NO: 168940 - DNA, 15 bp, Homo sapiens
tcctgatctactatt

SEQ ID NO: 168941 - DNA, 15 bp, Homo sapiens
cctgatctactattc

SEQ ID NO: 168942 - DNA, 15 bp, Homo sapiens
ctgatctactattcc

SEQ ID NO: 168943 - DNA, 15 bp, Homo sapiens
tgatctactattcct

SEQ ID NO: 168944 - DNA, 15 bp, Homo sapiens
gatctactattccta

SEQ ID NO: 168945 - DNA, 15 bp, Homo sapiens
atctactattcctag

SEQ ID NO: 168946 - DNA, 15 bp, Homo sapiens
tctactattcctagc

SEQ ID NO: 168947 - DNA, 15 bp, Homo sapiens
ctactattcctagct

SEQ ID NO: 168948 - DNA, 15 bp, Homo sapiens
tactattcctagcta

SEQ ID NO: 168949 - DNA, 15 bp, Homo sapiens
actattcctagctat

SEQ ID NO: 168950 - DNA, 15 bp, Homo sapiens
ctattcctagctatg

SEQ ID NO: 168951 - DNA, 15 bp, Homo sapiens
tattcctagctatgc

SEQ ID NO: 168952 - DNA, 15 bp, Homo sapiens
attcctagctatgct

SEQ ID NO: 168953 - DNA, 15 bp, Homo sapiens
ttcctagctatgctt

SEQ ID NO: 168954 - DNA, 15 bp, Homo sapiens
tcctagctatgcttt

SEQ ID NO: 168955 - DNA, 15 bp, Homo sapiens
cctagctatgctttt

SEQ ID NO: 168956 - DNA, 15 bp, Homo sapiens
ctagctatgcttttt

SEQ ID NO: 168957 - DNA, 15 bp, Homo sapiens
tagctatgcttttta

SEQ ID NO: 168958 - DNA, 15 bp, Homo sapiens
agctatgctttttac

SEQ ID NO: 168959 - DNA, 15 bp, Homo sapiens
gctatgctttttact

SEQ ID NO: 168960 - DNA, 15 bp, Homo sapiens
ctatgctttttacta

SEQ ID NO: 168961 - DNA, 15 bp, Homo sapiens
tatgctttttactaa

SEQ ID NO: 168962 - DNA, 15 bp, Homo sapiens
atgctttttactaaa

SEQ ID NO: 168963 - DNA, 15 bp, Homo sapiens
tgctttttactaaac

SEQ ID NO: 168964 - DNA, 15 bp, Homo sapiens
gctttttactaaacc

SEQ ID NO: 168965 - DNA, 15 bp, Homo sapiens
ctttttactaaacct

SEQ ID NO: 168966 - DNA, 15 bp, Homo sapiens
tttttactaaacctc

SEQ ID NO: 168967 - DNA, 15 bp, Homo sapiens
ttttactaaacctct

SEQ ID NO: 168968 - DNA, 15 bp, Homo sapiens
tttactaaacctctc

SEQ ID NO: 168969 - DNA, 15 bp, Homo sapiens
ttactaaacctctct

SEQ ID NO: 168970 - DNA, 15 bp, Homo sapiens
tactaaacctctctg

SEQ ID NO: 168971 - DNA, 15 bp, Homo sapiens
actaaacctctctga

SEQ ID NO: 168972 - DNA, 15 bp, Homo sapiens
ctaaacctctctgaa

SEQ ID NO: 168973 - DNA, 15 bp, Homo sapiens
taaacctctctgaac

SEQ ID NO: 168974 - DNA, 15 bp, Homo sapiens
aaacctctctgaacc

SEQ ID NO: 168975 - DNA, 15 bp, Homo sapiens
aacctctctgaacct

SEQ ID NO: 168976 - DNA, 15 bp, Homo sapiens
acctctctgaacctg

SEQ ID NO: 168977 - DNA, 15 bp, Homo sapiens
cctctctgaacctga

SEQ ID NO: 168978 - DNA, 15 bp, Homo sapiens
ctctctgaacctgaa

SEQ ID NO: 168979 - DNA, 15 bp, Homo sapiens
tctctgaacctgaaa

SEQ ID NO: 168980 - DNA, 15 bp, Homo sapiens
ctctgaacctgaaaa

SEQ ID NO: 168981 - DNA, 15 bp, Homo sapiens
tctgaacctgaaaag

SEQ ID NO: 168982 - DNA, 15 bp, Homo sapiens
ctgaacctgaaaagg

SEQ ID NO: 168983 - DNA, 15 bp, Homo sapiens
tgaacctgaaaaggg

SEQ ID NO: 168984 - DNA, 15 bp, Homo sapiens
gaacctgaaaaggga

SEQ ID NO: 168985 - DNA, 15 bp, Homo sapiens
aacctgaaaagggag

SEQ ID NO: 168986 - DNA, 15 bp, Homo sapiens
acctgaaaagggaga

SEQ ID NO: 168987 - DNA, 15 bp, Homo sapiens
cctgaaaagggagat

SEQ ID NO: 168988 - DNA, 15 bp, Homo sapiens
ctgaaaagggagatg

SEQ ID NO: 168989 - DNA, 15 bp, Homo sapiens
tgaaaagggagatga

SEQ ID NO: 168990 - DNA, 15 bp, Homo sapiens
gaaaagggagatgat

SEQ ID NO: 168991 - DNA, 15 bp, Homo sapiens
aaaagggagatgatg

SEQ ID NO: 168992 - DNA, 15 bp, Homo sapiens
aaagggagatgatgc

SEQ ID NO: 168993 - DNA, 15 bp, Homo sapiens
aagggagatgatgcc

SEQ ID NO: 168994 - DNA, 15 bp, Homo sapiens
agggagatgatgcct

SEQ ID NO: 168995 - DNA, 15 bp, Homo sapiens
gggagatgatgccta

SEQ ID NO: 168996 - DNA, 15 bp, Homo sapiens
ggagatgatgcctat

SEQ ID NO: 168997 - DNA, 15 bp, Homo sapiens
gagatgatgcctatg

SEQ ID NO: 168998 - DNA, 15 bp, Homo sapiens
agatgatgcctatgt

SEQ ID NO: 168999 - DNA, 15 bp, Homo sapiens
gatgatgcctatgta

SEQ ID NO: 169000 - DNA, 15 bp, Homo sapiens
atgatgcctatgtac

SEQ ID NO: 169001 - DNA, 15 bp, Homo sapiens
tgatgcctatgtact

SEQ ID NO: 169002 - DNA, 15 bp, Homo sapiens
gatgcctatgtactc

SEQ ID NO: 169003 - DNA, 15 bp, Homo sapiens
atgcctatgtactct

SEQ ID NO: 169004 - DNA, 15 bp, Homo sapiens
tgcctatgtactcta

SEQ ID NO: 169005 - DNA, 15 bp, Homo sapiens
gcctatgtactctat

SEQ ID NO: 169006 - DNA, 15 bp, Homo sapiens
cctatgtactctata

SEQ ID NO: 169007 - DNA, 15 bp, Homo sapiens
ctatgtactctatag

SEQ ID NO: 169008 - DNA, 15 bp, Homo sapiens
tatgtactctatagg

SEQ ID NO: 169009 - DNA, 15 bp, Homo sapiens
atgtactctatagga

SEQ ID NO: 169010 - DNA, 15 bp, Homo sapiens
tgtactctataggat

SEQ ID NO: 169011 - DNA, 15 bp, Homo sapiens
gtactctataggatt

SEQ ID NO: 169012 - DNA, 15 bp, Homo sapiens
tactctataggatta

SEQ ID NO: 169013 - DNA, 15 bp, Homo sapiens
actctataggattat

SEQ ID NO: 169014 - DNA, 15 bp, Homo sapiens
ctctataggattatt

SEQ ID NO: 169015 - DNA, 15 bp, Homo sapiens
tctataggattattg

SEQ ID NO: 169016 - DNA, 15 bp, Homo sapiens
ctataggattattgt

SEQ ID NO: 169017 - DNA, 15 bp, Homo sapiens
tataggattattgtg

SEQ ID NO: 169018 - DNA, 15 bp, Homo sapiens
ataggattattgtga

SEQ ID NO: 169019 - DNA, 15 bp, Homo sapiens
taggattattgtgag

SEQ ID NO: 169020 - DNA, 15 bp, Homo sapiens
aggattattgtgaga

SEQ ID NO: 169021 - DNA, 15 bp, Homo sapiens
ggattattgtgagaa

SEQ ID NO: 169022 - DNA, 15 bp, Homo sapiens
gattattgtgagaat

SEQ ID NO: 169023 - DNA, 15 bp, Homo sapiens
attattgtgagaatt

SEQ ID NO: 169024 - DNA, 15 bp, Homo sapiens
ttattgtgagaattt

SEQ ID NO: 169025 - DNA, 15 bp, Homo sapiens
tattgtgagaattta

SEQ ID NO: 169026 - DNA, 15 bp, Homo sapiens
attgtgagaatttac

SEQ ID NO: 169027 - DNA, 15 bp, Homo sapiens
ttgtgagaatttact

SEQ ID NO: 169028 - DNA, 15 bp, Homo sapiens
tgtgagaatttactg

SEQ ID NO: 169029 - DNA, 15 bp, Homo sapiens
gtgagaatttactgt

SEQ ID NO: 169030 - DNA, 15 bp, Homo sapiens
tgagaatttactgta

SEQ ID NO: 169031 - DNA, 15 bp, Homo sapiens
gagaatttactgtaa

SEQ ID NO: 169032 - DNA, 15 bp, Homo sapiens
agaatttactgtaat

SEQ ID NO: 169033 - DNA, 15 bp, Homo sapiens
gaatttactgtaata

SEQ ID NO: 169034 - DNA, 15 bp, Homo sapiens
aatttactgtaataa

SEQ ID NO: 169035 - DNA, 15 bp, Homo sapiens
atttactgtaataat

SEQ ID NO: 169036 - DNA, 15 bp, Homo sapiens
tttactgtaataata

SEQ ID NO: 169037 - DNA, 15 bp, Homo sapiens
ttactgtaataataa

SEQ ID NO: 169038 - DNA, 15 bp, Homo sapiens
tactgtaataataac

SEQ ID NO: 169039 - DNA, 15 bp, Homo sapiens
actgtaataataacc

SEQ ID NO: 169040 - DNA, 15 bp, Homo sapiens
ctgtaataataacca

SEQ ID NO: 169041 - DNA, 15 bp, Homo sapiens
tgtaataataaccat

SEQ ID NO: 169042 - DNA, 15 bp, Homo sapiens
gtaataataaccata

SEQ ID NO: 169043 - DNA, 15 bp, Homo sapiens
taataataaccataa

SEQ ID NO: 169044 - DNA, 15 bp, Homo sapiens
aataataaccataaa

SEQ ID NO: 169045 - DNA, 15 bp, Homo sapiens
ataataaccataaaa

SEQ ID NO: 169046 - DNA, 15 bp, Homo sapiens
taataaccataaaaa

SEQ ID NO: 169047 - DNA, 15 bp, Homo sapiens
aataaccataaaaac

SEQ ID NO: 169048 - DNA, 15 bp, Homo sapiens
ataaccataaaaact

SEQ ID NO: 169049 - DNA, 15 bp, Homo sapiens
taaccataaaaacta

SEQ ID NO: 169050 - DNA, 15 bp, Homo sapiens
aaccataaaaactac

SEQ ID NO: 169051 - DNA, 15 bp, Homo sapiens
accataaaaactacc

SEQ ID NO: 169052 - DNA, 15 bp, Homo sapiens
ccataaaaactacca

SEQ ID NO: 169053 - DNA, 15 bp, Homo sapiens
cataaaaactaccat

SEQ ID NO: 169054 - DNA, 15 bp, Homo sapiens
ataaaaactaccatt

SEQ ID NO: 169055 - DNA, 15 bp, Homo sapiens
taaaaactaccattt

SEQ ID NO: 169056 - DNA, 15 bp, Homo sapiens
aaaaactaccattta

SEQ ID NO: 169057 - DNA, 15 bp, Homo sapiens
aaaactaccatttag

SEQ ID NO: 169058 - DNA, 15 bp, Homo sapiens
aaactaccatttagt

SEQ ID NO: 169059 - DNA, 15 bp, Homo sapiens
aactaccatttagtg

SEQ ID NO: 169060 - DNA, 15 bp, Homo sapiens
actaccatttagtga

SEQ ID NO: 169061 - DNA, 15 bp, Homo sapiens
ctaccatttagtgag

SEQ ID NO: 169062 - DNA, 15 bp, Homo sapiens
taccatttagtgagc

SEQ ID NO: 169063 - DNA, 15 bp, Homo sapiens
accatttagtgagca

SEQ ID NO: 169064 - DNA, 15 bp, Homo sapiens
ccatttagtgagcac

SEQ ID NO: 169065 - DNA, 15 bp, Homo sapiens
catttagtgagcacc

SEQ ID NO: 169066 - DNA, 15 bp, Homo sapiens
atttagtgagcacct

SEQ ID NO: 169067 - DNA, 15 bp, Homo sapiens
tttagtgagcaccta

SEQ ID NO: 169068 - DNA, 15 bp, Homo sapiens
ttagtgagcacctac

SEQ ID NO: 169069 - DNA, 15 bp, Homo sapiens
tagtgagcacctacc

SEQ ID NO: 169070 - DNA, 15 bp, Homo sapiens
agtgagcacctacca

SEQ ID NO: 169071 - DNA, 15 bp, Homo sapiens
gtgagcacctaccat

SEQ ID NO: 169072 - DNA, 15 bp, Homo sapiens
gagcacctaccatgg

SEQ ID NO: 169073 - DNA, 15 bp, Homo sapiens
agcacctaccatggg

SEQ ID NO: 169074 - DNA, 15 bp, Homo sapiens
gcacctaccatgggc

SEQ ID NO: 169075 - DNA, 15 bp, Homo sapiens
cacctaccatgggcc

SEQ ID NO: 169076 - DNA, 15 bp, Homo sapiens
acctaccatgggcca

SEQ ID NO: 169077 - DNA, 15 bp, Homo sapiens
cctaccatgggccag

SEQ ID NO: 169078 - DNA, 15 bp, Homo sapiens
ctaccatgggccagg

SEQ ID NO: 169079 - DNA, 15 bp, Homo sapiens
taccatgggccaggc

SEQ ID NO: 169080 - DNA, 15 bp, Homo sapiens
accatgggccaggca

SEQ ID NO: 169081 - DNA, 15 bp, Homo sapiens
ccatgggccaggcat

SEQ ID NO: 169082 - DNA, 15 bp, Homo sapiens
catgggccaggcatt

SEQ ID NO: 169083 - DNA, 15 bp, Homo sapiens
atgggccaggcattt

SEQ ID NO: 169084 - DNA, 15 bp, Homo sapiens
tgggccaggcatttt

SEQ ID NO: 169085 - DNA, 15 bp, Homo sapiens
gggccaggcatttta

SEQ ID NO: 169086 - DNA, 15 bp, Homo sapiens
ggccaggcattttac

SEQ ID NO: 169087 - DNA, 15 bp, Homo sapiens
gccaggcattttact

SEQ ID NO: 169088 - DNA, 15 bp, Homo sapiens
ccaggcattttactt

SEQ ID NO: 169089 - DNA, 15 bp, Homo sapiens
caggcattttacttg

SEQ ID NO: 169090 - DNA, 15 bp, Homo sapiens
aggcattttacttgg

SEQ ID NO: 169091 - DNA, 15 bp, Homo sapiens
ggcattttacttggt

SEQ ID NO: 169092 - DNA, 15 bp, Homo sapiens
gcattttacttggtg

SEQ ID NO: 169093 - DNA, 15 bp, Homo sapiens
cattttacttggtgc

SEQ ID NO: 169094 - DNA, 15 bp, Homo sapiens
attttacttggtgcc

SEQ ID NO: 169095 - DNA, 15 bp, Homo sapiens
ttttacttggtgcct

SEQ ID NO: 169096 - DNA, 15 bp, Homo sapiens
tttacttggtgccta

SEQ ID NO: 169097 - DNA, 15 bp, Homo sapiens
ttacttggtgcctaa

SEQ ID NO: 169098 - DNA, 15 bp, Homo sapiens
tacttggtgcctaat

SEQ ID NO: 169099 - DNA, 15 bp, Homo sapiens
acttggtgcctaatc

SEQ ID NO: 169100 - DNA, 15 bp, Homo sapiens
cttggtgcctaatcc

SEQ ID NO: 169101 - DNA, 15 bp, Homo sapiens
ttggtgcctaatcct

SEQ ID NO: 169102 - DNA, 15 bp, Homo sapiens
tggtgcctaatccta

SEQ ID NO: 169103 - DNA, 15 bp, Homo sapiens
ggtgcctaatcctat

SEQ ID NO: 169104 - DNA, 15 bp, Homo sapiens
gtgcctaatcctatt

SEQ ID NO: 169105 - DNA, 15 bp, Homo sapiens
tgcctaatcctattt

SEQ ID NO: 169106 - DNA, 15 bp, Homo sapiens
gcctaatcctattta

SEQ ID NO: 169107 - DNA, 15 bp, Homo sapiens
cctaatcctatttaa

SEQ ID NO: 169108 - DNA, 15 bp, Homo sapiens
ctaatcctatttaaa

SEQ ID NO: 169109 - DNA, 15 bp, Homo sapiens
taatcctatttaaat

SEQ ID NO: 169110 - DNA, 15 bp, Homo sapiens
aatcctatttaaatt

SEQ ID NO: 169111 - DNA, 15 bp, Homo sapiens
atcctatttaaatta

SEQ ID NO: 169112 - DNA, 15 bp, Homo sapiens
tcctatttaaattag

SEQ ID NO: 169113 - DNA, 15 bp, Homo sapiens
cctatttaaattaga

SEQ ID NO: 169114 - DNA, 15 bp, Homo sapiens
ctatttaaattagat

SEQ ID NO: 169115 - DNA, 15 bp, Homo sapiens
tatttaaattagata

SEQ ID NO: 169116 - DNA, 15 bp, Homo sapiens
atttaaattagataa

SEQ ID NO: 169117 - DNA, 15 bp, Homo sapiens
tttaaattagataaa

SEQ ID NO: 169118 - DNA, 15 bp, Homo sapiens
ttaaattagataaaa

SEQ ID NO: 169119 - DNA, 15 bp, Homo sapiens
taaattagataaaaa

SEQ ID NO: 169120 - DNA, 15 bp, Homo sapiens
aaattagataaaaaa

SEQ ID NO: 169121 - DNA, 15 bp, Homo sapiens
aattagataaaaaag

SEQ ID NO: 169122 - DNA, 15 bp, Homo sapiens
attagataaaaaagt

SEQ ID NO: 169123 - DNA, 15 bp, Homo sapiens
ttagataaaaaagta

SEQ ID NO: 169124 - DNA, 15 bp, Homo sapiens
tagataaaaaagtac

SEQ ID NO: 169125 - DNA, 15 bp, Homo sapiens
agataaaaaagtacc

SEQ ID NO: 169126 - DNA, 15 bp, Homo sapiens
gataaaaaagtacca

SEQ ID NO: 169127 - DNA, 15 bp, Homo sapiens
ataaaaaagtaccaa

SEQ ID NO: 169128 - DNA, 15 bp, Homo sapiens
taaaaaagtaccaaa

SEQ ID NO: 169129 - DNA, 15 bp, Homo sapiens
aaaaaagtaccaaat

SEQ ID NO: 169130 - DNA, 15 bp, Homo sapiens
aaaaagtaccaaata

SEQ ID NO: 169131 - DNA, 15 bp, Homo sapiens
aaaagtaccaaatag

SEQ ID NO: 169132 - DNA, 15 bp, Homo sapiens
aaagtaccaaatagg

SEQ ID NO: 169133 - DNA, 15 bp, Homo sapiens
aagtaccaaataggt

SEQ ID NO: 169134 - DNA, 15 bp, Homo sapiens
agtaccaaataggtc

SEQ ID NO: 169135 - DNA, 15 bp, Homo sapiens
gtaccaaataggtcc

SEQ ID NO: 169136 - DNA, 15 bp, Homo sapiens
taccaaataggtcct

SEQ ID NO: 169137 - DNA, 15 bp, Homo sapiens
accaaataggtcctg

SEQ ID NO: 169138 - DNA, 15 bp, Homo sapiens
ccaaataggtcctga

SEQ ID NO: 169139 - DNA, 15 bp, Homo sapiens
caaataggtcctgac

SEQ ID NO: 169140 - DNA, 15 bp, Homo sapiens
aaataggtcctgaca

SEQ ID NO: 169141 - DNA, 15 bp, Homo sapiens
aataggtcctgacac

SEQ ID NO: 169142 - DNA, 15 bp, Homo sapiens
ataggtcctgacact

SEQ ID NO: 169143 - DNA, 15 bp, Homo sapiens
taggtcctgacactt

SEQ ID NO: 169144 - DNA, 15 bp, Homo sapiens
aggtcctgacactta

SEQ ID NO: 169145 - DNA, 15 bp, Homo sapiens
ggtcctgacacttaa

SEQ ID NO: 169146 - DNA, 15 bp, Homo sapiens
gtcctgacacttaag

SEQ ID NO: 169147 - DNA, 15 bp, Homo sapiens
tcctgacacttaaga

SEQ ID NO: 169148 - DNA, 15 bp, Homo sapiens
cctgacacttaagaa

SEQ ID NO: 169149 - DNA, 15 bp, Homo sapiens
ctgacacttaagaag

SEQ ID NO: 169150 - DNA, 15 bp, Homo sapiens
tgacacttaagaagt

SEQ ID NO: 169151 - DNA, 15 bp, Homo sapiens
gacacttaagaagta

SEQ ID NO: 169152 - DNA, 15 bp, Homo sapiens
acacttaagaagtac

SEQ ID NO: 169153 - DNA, 15 bp, Homo sapiens
cacttaagaagtact

SEQ ID NO: 169154 - DNA, 15 bp, Homo sapiens
acttaagaagtactc

SEQ ID NO: 169155 - DNA, 15 bp, Homo sapiens
cttaagaagtactca

SEQ ID NO: 169156 - DNA, 15 bp, Homo sapiens
ttaagaagtactcag

SEQ ID NO: 169157 - DNA, 15 bp, Homo sapiens
taagaagtactcagt

SEQ ID NO: 169158 - DNA, 15 bp, Homo sapiens
aagaagtactcagta

SEQ ID NO: 169159 - DNA, 15 bp, Homo sapiens
agaagtactcagtaa

SEQ ID NO: 169160 - DNA, 15 bp, Homo sapiens
gaagtactcagtaaa

SEQ ID NO: 169161 - DNA, 15 bp, Homo sapiens
aagtactcagtaaat

SEQ ID NO: 169162 - DNA, 15 bp, Homo sapiens
agtactcagtaaata

SEQ ID NO: 169163 - DNA, 15 bp, Homo sapiens
gtactcagtaaatat

SEQ ID NO: 169164 - DNA, 15 bp, Homo sapiens
tactcagtaaatatt

SEQ ID NO: 169165 - DNA, 15 bp, Homo sapiens
actcagtaaatattt

SEQ ID NO: 169166 - DNA, 15 bp, Homo sapiens
ctcagtaaatatttt

SEQ ID NO: 169167 - DNA, 15 bp, Homo sapiens
tcagtaaatattttc

SEQ ID NO: 169168 - DNA, 15 bp, Homo sapiens
cagtaaatattttct

SEQ ID NO: 169169 - DNA, 15 bp, Homo sapiens
agtaaatattttctt

SEQ ID NO: 169170 - DNA, 15 bp, Homo sapiens
gtaaatattttcttc

SEQ ID NO: 169171 - DNA, 15 bp, Homo sapiens
taaatattttcttcc

SEQ ID NO: 169172 - DNA, 15 bp, Homo sapiens
aaatattttcttccc

SEQ ID NO: 169173 - DNA, 15 bp, Homo sapiens
aatattttcttccct

SEQ ID NO: 169174 - DNA, 15 bp, Homo sapiens
atattttcttccctc

SEQ ID NO: 169175 - DNA, 15 bp, Homo sapiens
tattttcttccctct

SEQ ID NO: 169176 - DNA, 15 bp, Homo sapiens
attttcttccctctt

SEQ ID NO: 169177 - DNA, 15 bp, Homo sapiens
ttttcttccctcttc

SEQ ID NO: 169178 - DNA, 15 bp, Homo sapiens
tttcttccctcttcc

SEQ ID NO: 169179 - DNA, 15 bp, Homo sapiens
ttcttccctcttccc

SEQ ID NO: 169180 - DNA, 15 bp, Homo sapiens
tcttccctcttccct

SEQ ID NO: 169181 - DNA, 15 bp, Homo sapiens
cttccctcttccctt

SEQ ID NO: 169182 - DNA, 15 bp, Homo sapiens
ttccctcttcccttt

SEQ ID NO: 169183 - DNA, 15 bp, Homo sapiens
tccctcttcccttta

SEQ ID NO: 169184 - DNA, 15 bp, Homo sapiens
ccctcttccctttaa

SEQ ID NO: 169185 - DNA, 15 bp, Homo sapiens
cctcttccctttaat

SEQ ID NO: 169186 - DNA, 15 bp, Homo sapiens
ctcttccctttaatc

SEQ ID NO: 169187 - DNA, 15 bp, Homo sapiens
tcttccctttaatca

SEQ ID NO: 169188 - DNA, 15 bp, Homo sapiens
cttccctttaatcaa

SEQ ID NO: 169189 - DNA, 15 bp, Homo sapiens
ttccctttaatcaag

SEQ ID NO: 169190 - DNA, 15 bp, Homo sapiens
tccctttaatcaaga

SEQ ID NO: 169191 - DNA, 15 bp, Homo sapiens
ccctttaatcaagac

SEQ ID NO: 169192 - DNA, 15 bp, Homo sapiens
cctttaatcaagacc

SEQ ID NO: 169193 - DNA, 15 bp, Homo sapiens
ctttaatcaagaccg

SEQ ID NO: 169194 - DNA, 15 bp, Homo sapiens
tttaatcaagaccgt

SEQ ID NO: 169195 - DNA, 15 bp, Homo sapiens
ttaatcaagaccgta

SEQ ID NO: 169196 - DNA, 15 bp, Homo sapiens
taatcaagaccgtat

SEQ ID NO: 169197 - DNA, 15 bp, Homo sapiens
aatcaagaccgtatg

SEQ ID NO: 169198 - DNA, 15 bp, Homo sapiens
atcaagaccgtatgt

SEQ ID NO: 169199 - DNA, 15 bp, Homo sapiens
tcaagaccgtatgtg

SEQ ID NO: 169200 - DNA, 15 bp, Homo sapiens
caagaccgtatgtgc

SEQ ID NO: 169201 - DNA, 15 bp, Homo sapiens
aagaccgtatgtgcc

SEQ ID NO: 169202 - DNA, 15 bp, Homo sapiens
agaccgtatgtgcca

SEQ ID NO: 169203 - DNA, 15 bp, Homo sapiens
gaccgtatgtgccaa

SEQ ID NO: 169204 - DNA, 15 bp, Homo sapiens
accgtatgtgccaaa

SEQ ID NO: 169205 - DNA, 15 bp, Homo sapiens
ccgtatgtgccaaag

SEQ ID NO: 169206 - DNA, 15 bp, Homo sapiens
cgtatgtgccaaagt

SEQ ID NO: 169207 - DNA, 15 bp, Homo sapiens
gtatgtgccaaagta

SEQ ID NO: 169208 - DNA, 15 bp, Homo sapiens
tatgtgccaaagtaa

SEQ ID NO: 169209 - DNA, 15 bp, Homo sapiens
atgtgccaaagtaaa

SEQ ID NO: 169210 - DNA, 15 bp, Homo sapiens
tgtgccaaagtaaat

SEQ ID NO: 169211 - DNA, 15 bp, Homo sapiens
gtgccaaagtaaatg

SEQ ID NO: 169212 - DNA, 15 bp, Homo sapiens
tgccaaagtaaatgg

SEQ ID NO: 169213 - DNA, 15 bp, Homo sapiens
gccaaagtaaatgga

SEQ ID NO: 169214 - DNA, 15 bp, Homo sapiens
ccaaagtaaatggat

SEQ ID NO: 169215 - DNA, 15 bp, Homo sapiens
caaagtaaatggatg

SEQ ID NO: 169216 - DNA, 15 bp, Homo sapiens
aaagtaaatggatga

SEQ ID NO: 169217 - DNA, 15 bp, Homo sapiens
aagtaaatggatgac

SEQ ID NO: 169218 - DNA, 15 bp, Homo sapiens
agtaaatggatgact

SEQ ID NO: 169219 - DNA, 15 bp, Homo sapiens
gtaaatggatgactg

SEQ ID NO: 169220 - DNA, 15 bp, Homo sapiens
taaatggatgactga

SEQ ID NO: 169221 - DNA, 15 bp, Homo sapiens
aaatggatgactgag

SEQ ID NO: 169222 - DNA, 15 bp, Homo sapiens
aatggatgactgagc

SEQ ID NO: 169223 - DNA, 15 bp, Homo sapiens
atggatgactgagca

SEQ ID NO: 169224 - DNA, 15 bp, Homo sapiens
tggatgactgagcag

SEQ ID NO: 169225 - DNA, 15 bp, Homo sapiens
ggatgactgagcagt

SEQ ID NO: 169226 - DNA, 15 bp, Homo sapiens
gatgactgagcagtt

SEQ ID NO: 169227 - DNA, 15 bp, Homo sapiens
atgactgagcagttg

SEQ ID NO: 169228 - DNA, 15 bp, Homo sapiens
tgactgagcagttgg

SEQ ID NO: 169229 - DNA, 15 bp, Homo sapiens
gactgagcagttggt

SEQ ID NO: 169230 - DNA, 15 bp, Homo sapiens
actgagcagttggtg

SEQ ID NO: 169231 - DNA, 15 bp, Homo sapiens
ctgagcagttggtga

SEQ ID NO: 169232 - DNA, 15 bp, Homo sapiens
tgagcagttggtgat

SEQ ID NO: 169233 - DNA, 15 bp, Homo sapiens
gagcagttggtgatg

SEQ ID NO: 169234 - DNA, 15 bp, Homo sapiens
agcagttggtgatgt

SEQ ID NO: 169235 - DNA, 15 bp, Homo sapiens
gcagttggtgatgta

SEQ ID NO: 169236 - DNA, 15 bp, Homo sapiens
cagttggtgatgtag

SEQ ID NO: 169237 - DNA, 15 bp, Homo sapiens
agttggtgatgtagg

SEQ ID NO: 169238 - DNA, 15 bp, Homo sapiens
gttggtgatgtaggg

SEQ ID NO: 169239 - DNA, 15 bp, Homo sapiens
ttggtgatgtagggg

SEQ ID NO: 169240 - DNA, 15 bp, Homo sapiens
tggtgatgtaggggt

SEQ ID NO: 169241 - DNA, 15 bp, Homo sapiens
ggtgatgtaggggtg

SEQ ID NO: 169242 - DNA, 15 bp, Homo sapiens
gtgatgtaggggtgg

SEQ ID NO: 169243 - DNA, 15 bp, Homo sapiens
tgatgtaggggtggg

SEQ ID NO: 169244 - DNA, 15 bp, Homo sapiens
gatgtaggggtgggg

SEQ ID NO: 169245 - DNA, 15 bp, Homo sapiens
atgtaggggtggggg

SEQ ID NO: 169246 - DNA, 15 bp, Homo sapiens
tgtaggggtgggggg

SEQ ID NO: 169247 - DNA, 15 bp, Homo sapiens
gtaggggtggggggc

SEQ ID NO: 169248 - DNA, 15 bp, Homo sapiens
taggggtggggggcg

SEQ ID NO: 169249 - DNA, 15 bp, Homo sapiens
aggggtggggggcga

SEQ ID NO: 169250 - DNA, 15 bp, Homo sapiens
ggggtggggggcgat

SEQ ID NO: 169251 - DNA, 15 bp, Homo sapiens
gggtggggggcgata

SEQ ID NO: 169252 - DNA, 15 bp, Homo sapiens
ggtggggggcgatat

SEQ ID NO: 169253 - DNA, 15 bp, Homo sapiens
gtggggggcgatata

SEQ ID NO: 169254 - DNA, 15 bp, Homo sapiens
tggggggcgatatag

SEQ ID NO: 169255 - DNA, 15 bp, Homo sapiens
ggggggcgatataga

SEQ ID NO: 169256 - DNA, 15 bp, Homo sapiens
gggggcgatatagaa

SEQ ID NO: 169257 - DNA, 15 bp, Homo sapiens
ggggcgatatagaaa

SEQ ID NO: 169258 - DNA, 15 bp, Homo sapiens
gggcgatatagaaag

SEQ ID NO: 169259 - DNA, 15 bp, Homo sapiens
ggcgatatagaaagt

SEQ ID NO: 169260 - DNA, 15 bp, Homo sapiens
gcgatatagaaagtc

SEQ ID NO: 169261 - DNA, 15 bp, Homo sapiens
cgatatagaaagtca

SEQ ID NO: 169262 - DNA, 15 bp, Homo sapiens
gatatagaaagtcag

SEQ ID NO: 169263 - DNA, 15 bp, Homo sapiens
atatagaaagtcagt

SEQ ID NO: 169264 - DNA, 15 bp, Homo sapiens
tatagaaagtcagtt

SEQ ID NO: 169265 - DNA, 15 bp, Homo sapiens
atagaaagtcagttt

SEQ ID NO: 169266 - DNA, 15 bp, Homo sapiens
tagaaagtcagtttt

SEQ ID NO: 169267 - DNA, 15 bp, Homo sapiens
agaaagtcagttttt

SEQ ID NO: 169268 - DNA, 15 bp, Homo sapiens
gaaagtcagtttttg

SEQ ID NO: 169269 - DNA, 15 bp, Homo sapiens
aaagtcagtttttgg

SEQ ID NO: 169270 - DNA, 15 bp, Homo sapiens
aagtcagtttttggc

SEQ ID NO: 169271 - DNA, 15 bp, Homo sapiens
agtcagtttttggcc

SEQ ID NO: 169272 - DNA, 15 bp, Homo sapiens
gtcagtttttggccg

SEQ ID NO: 169273 - DNA, 15 bp, Homo sapiens
tcagtttttggccgg

SEQ ID NO: 169274 - DNA, 15 bp, Homo sapiens
cagtttttggccggg

SEQ ID NO: 169275 - DNA, 15 bp, Homo sapiens
agtttttggccgggc

SEQ ID NO: 169276 - DNA, 15 bp, Homo sapiens
gtttttggccgggcg

SEQ ID NO: 169277 - DNA, 15 bp, Homo sapiens
tttttggccgggcgt

SEQ ID NO: 169278 - DNA, 15 bp, Homo sapiens
ttttggccgggcgtg

SEQ ID NO: 169279 - DNA, 15 bp, Homo sapiens
tttggccgggcgtgg

SEQ ID NO: 169280 - DNA, 15 bp, Homo sapiens
ttggccgggcgtggt

SEQ ID NO: 169281 - DNA, 15 bp, Homo sapiens
tggccgggcgtggtg

SEQ ID NO: 169282 - DNA, 15 bp, Homo sapiens
ggcgtggtggctcat

SEQ ID NO: 169283 - DNA, 15 bp, Homo sapiens
gcgtggtggctcatg

SEQ ID NO: 169284 - DNA, 15 bp, Homo sapiens
cgtggtggctcatgc

SEQ ID NO: 169285 - DNA, 15 bp, Homo sapiens
gtggtggctcatgcc

SEQ ID NO: 169286 - DNA, 15 bp, Homo sapiens
ttgggaggctgagga

SEQ ID NO: 169287 - DNA, 15 bp, Homo sapiens
tgggaggctgaggag

SEQ ID NO: 169288 - DNA, 15 bp, Homo sapiens
gggaggctgaggagc

SEQ ID NO: 169289 - DNA, 15 bp, Homo sapiens
ggaggctgaggagca

SEQ ID NO: 169290 - DNA, 15 bp, Homo sapiens
gaggctgaggagcag

SEQ ID NO: 169291 - DNA, 15 bp, Homo sapiens
aggctgaggagcagg

SEQ ID NO: 169292 - DNA, 15 bp, Homo sapiens
ggctgaggagcaggc

SEQ ID NO: 169293 - DNA, 15 bp, Homo sapiens
gctgaggagcaggca

SEQ ID NO: 169294 - DNA, 15 bp, Homo sapiens
ctgaggagcaggcag

SEQ ID NO: 169295 - DNA, 15 bp, Homo sapiens
tgaggagcaggcaga

SEQ ID NO: 169296 - DNA, 15 bp, Homo sapiens
gaggagcaggcagat

SEQ ID NO: 169297 - DNA, 15 bp, Homo sapiens
aggagcaggcagatc

SEQ ID NO: 169298 - DNA, 15 bp, Homo sapiens
ggagcaggcagatca

SEQ ID NO: 169299 - DNA, 15 bp, Homo sapiens
gagcaggcagatcat

SEQ ID NO: 169300 - DNA, 15 bp, Homo sapiens
agcaggcagatcatg

SEQ ID NO: 169301 - DNA, 15 bp, Homo sapiens
gcaggcagatcatga

SEQ ID NO: 169302 - DNA, 15 bp, Homo sapiens
caggcagatcatgag

SEQ ID NO: 169303 - DNA, 15 bp, Homo sapiens
aggcagatcatgagg

SEQ ID NO: 169304 - DNA, 15 bp, Homo sapiens
ggcagatcatgaggt

SEQ ID NO: 169305 - DNA, 15 bp, Homo sapiens
gcagatcatgaggtc

SEQ ID NO: 169306 - DNA, 15 bp, Homo sapiens
cagatcatgaggtca

SEQ ID NO: 169307 - DNA, 15 bp, Homo sapiens
agatcatgaggtcag

SEQ ID NO: 169308 - DNA, 15 bp, Homo sapiens
gaggtcaggagatcc

SEQ ID NO: 169309 - DNA, 15 bp, Homo sapiens
aggtcaggagatcca

SEQ ID NO: 169310 - DNA, 15 bp, Homo sapiens
ggtcaggagatccag

SEQ ID NO: 169311 - DNA, 15 bp, Homo sapiens
gtcaggagatccaga

SEQ ID NO: 169312 - DNA, 15 bp, Homo sapiens
tcaggagatccagat

SEQ ID NO: 169313 - DNA, 15 bp, Homo sapiens
caggagatccagata

SEQ ID NO: 169314 - DNA, 15 bp, Homo sapiens
aggagatccagataa

SEQ ID NO: 169315 - DNA, 15 bp, Homo sapiens
ggagatccagataat

SEQ ID NO: 169316 - DNA, 15 bp, Homo sapiens
gagatccagataatc

SEQ ID NO: 169317 - DNA, 15 bp, Homo sapiens
agatccagataatcc

SEQ ID NO: 169318 - DNA, 15 bp, Homo sapiens
gatccagataatcct

SEQ ID NO: 169319 - DNA, 15 bp, Homo sapiens
atccagataatcctg

SEQ ID NO: 169320 - DNA, 15 bp, Homo sapiens
tccagataatcctgg

SEQ ID NO: 169321 - DNA, 15 bp, Homo sapiens
ccagataatcctggc

SEQ ID NO: 169322 - DNA, 15 bp, Homo sapiens
cagataatcctggcc

SEQ ID NO: 169323 - DNA, 15 bp, Homo sapiens
agataatcctggcca

SEQ ID NO: 169324 - DNA, 15 bp, Homo sapiens
gataatcctggccaa

SEQ ID NO: 169325 - DNA, 15 bp, Homo sapiens
ataatcctggccaac

SEQ ID NO: 169326 - DNA, 15 bp, Homo sapiens
taatcctggccaaca

SEQ ID NO: 169327 - DNA, 15 bp, Homo sapiens
aatcctggccaacag

SEQ ID NO: 169328 - DNA, 15 bp, Homo sapiens
atcctggccaacagg

SEQ ID NO: 169329 - DNA, 15 bp, Homo sapiens
tcctggccaacaggg

SEQ ID NO: 169330 - DNA, 15 bp, Homo sapiens
cctggccaacagggt

SEQ ID NO: 169331 - DNA, 15 bp, Homo sapiens
ctggccaacagggtg

SEQ ID NO: 169332 - DNA, 15 bp, Homo sapiens
tggccaacagggtga

SEQ ID NO: 169333 - DNA, 15 bp, Homo sapiens
ggccaacagggtgaa

SEQ ID NO: 169334 - DNA, 15 bp, Homo sapiens
gccaacagggtgaaa

SEQ ID NO: 169335 - DNA, 15 bp, Homo sapiens
ccaacagggtgaaac

SEQ ID NO: 169336 - DNA, 15 bp, Homo sapiens
caacagggtgaaacc

SEQ ID NO: 169337 - DNA, 15 bp, Homo sapiens
aacagggtgaaaccc

SEQ ID NO: 169338 - DNA, 15 bp, Homo sapiens
acagggtgaaacccc

SEQ ID NO: 169339 - DNA, 15 bp, Homo sapiens
cagggtgaaaccccg

SEQ ID NO: 169340 - DNA, 15 bp, Homo sapiens
agggtgaaaccccgt

SEQ ID NO: 169341 - DNA, 15 bp, Homo sapiens
gggtgaaaccccgtc

SEQ ID NO: 169342 - DNA, 15 bp, Homo sapiens
aattagctgggcatg

SEQ ID NO: 169343 - DNA, 15 bp, Homo sapiens
attagctgggcatgg

SEQ ID NO: 169344 - DNA, 15 bp, Homo sapiens
ttagctgggcatggt

SEQ ID NO: 169345 - DNA, 15 bp, Homo sapiens
tagctgggcatggtg

SEQ ID NO: 169346 - DNA, 15 bp, Homo sapiens
agctgggcatggtgg

SEQ ID NO: 169347 - DNA, 15 bp, Homo sapiens
gctgggcatggtggt

SEQ ID NO: 169348 - DNA, 15 bp, Homo sapiens
ctgggcatggtggtg

SEQ ID NO: 169349 - DNA, 15 bp, Homo sapiens
tgggcatggtggtgc

SEQ ID NO: 169350 - DNA, 15 bp, Homo sapiens
gggcatggtggtgcg

SEQ ID NO: 169351 - DNA, 15 bp, Homo sapiens
ggcatggtggtgcgc

SEQ ID NO: 169352 - DNA, 15 bp, Homo sapiens
gcatggtggtgcgca

SEQ ID NO: 169353 - DNA, 15 bp, Homo sapiens
catggtggtgcgcac

SEQ ID NO: 169354 - DNA, 15 bp, Homo sapiens
atggtggtgcgcact

SEQ ID NO: 169355 - DNA, 15 bp, Homo sapiens
tggtggtgcgcactt

SEQ ID NO: 169356 - DNA, 15 bp, Homo sapiens
ggtggtgcgcacttg

SEQ ID NO: 169357 - DNA, 15 bp, Homo sapiens
gtggtgcgcacttgt

SEQ ID NO: 169358 - DNA, 15 bp, Homo sapiens
tggtgcgcacttgta

SEQ ID NO: 169359 - DNA, 15 bp, Homo sapiens
ggtgcgcacttgtag

SEQ ID NO: 169360 - DNA, 15 bp, Homo sapiens
gtgcgcacttgtagt

SEQ ID NO: 169361 - DNA, 15 bp, Homo sapiens
tgcgcacttgtagtc

SEQ ID NO: 169362 - DNA, 15 bp, Homo sapiens
gcgcacttgtagtcc

SEQ ID NO: 169363 - DNA, 15 bp, Homo sapiens
cgcacttgtagtccc

SEQ ID NO: 169364 - DNA, 15 bp, Homo sapiens
gcacttgtagtccca

SEQ ID NO: 169365 - DNA, 15 bp, Homo sapiens
cacttgtagtcccag

SEQ ID NO: 169366 - DNA, 15 bp, Homo sapiens
acttgtagtcccagc

SEQ ID NO: 169367 - DNA, 15 bp, Homo sapiens
cttgtagtcccagct

SEQ ID NO: 169368 - DNA, 15 bp, Homo sapiens
ttgtagtcccagcta

SEQ ID NO: 169369 - DNA, 15 bp, Homo sapiens
gtcccagctacttgc

SEQ ID NO: 169370 - DNA, 15 bp, Homo sapiens
tcccagctacttgcg

SEQ ID NO: 169371 - DNA, 15 bp, Homo sapiens
cccagctacttgcga

SEQ ID NO: 169372 - DNA, 15 bp, Homo sapiens
ccagctacttgcgag

SEQ ID NO: 169373 - DNA, 15 bp, Homo sapiens
cagctacttgcgagg

SEQ ID NO: 169374 - DNA, 15 bp, Homo sapiens
agctacttgcgaggc

SEQ ID NO: 169375 - DNA, 15 bp, Homo sapiens
gctacttgcgaggct

SEQ ID NO: 169376 - DNA, 15 bp, Homo sapiens
ctacttgcgaggctg

SEQ ID NO: 169377 - DNA, 15 bp, Homo sapiens
tacttgcgaggctga

SEQ ID NO: 169378 - DNA, 15 bp, Homo sapiens
acttgcgaggctgag

SEQ ID NO: 169379 - DNA, 15 bp, Homo sapiens
cttgcgaggctgagg

SEQ ID NO: 169380 - DNA, 15 bp, Homo sapiens
ttgcgaggctgaggc

SEQ ID NO: 169381 - DNA, 15 bp, Homo sapiens
tgcgaggctgaggca

SEQ ID NO: 169382 - DNA, 15 bp, Homo sapiens
gcgaggctgaggcag

SEQ ID NO: 169383 - DNA, 15 bp, Homo sapiens
cgaggctgaggcagg

SEQ ID NO: 169384 - DNA, 15 bp, Homo sapiens
gcaggagaattgctc

SEQ ID NO: 169385 - DNA, 15 bp, Homo sapiens
caggagaattgctcg

SEQ ID NO: 169386 - DNA, 15 bp, Homo sapiens
aggagaattgctcga

SEQ ID NO: 169387 - DNA, 15 bp, Homo sapiens
ggagaattgctcgaa

SEQ ID NO: 169388 - DNA, 15 bp, Homo sapiens
gagaattgctcgaac

SEQ ID NO: 169389 - DNA, 15 bp, Homo sapiens
agaattgctcgaacc

SEQ ID NO: 169390 - DNA, 15 bp, Homo sapiens
gaattgctcgaaccc

SEQ ID NO: 169391 - DNA, 15 bp, Homo sapiens
aattgctcgaaccca

SEQ ID NO: 169392 - DNA, 15 bp, Homo sapiens
attgctcgaacccag

SEQ ID NO: 169393 - DNA, 15 bp, Homo sapiens
ttgctcgaacccagg

SEQ ID NO: 169394 - DNA, 15 bp, Homo sapiens
tgctcgaacccagga

SEQ ID NO: 169395 - DNA, 15 bp, Homo sapiens
gctcgaacccaggag

SEQ ID NO: 169396 - DNA, 15 bp, Homo sapiens
ctcgaacccaggagg

SEQ ID NO: 169397 - DNA, 15 bp, Homo sapiens
tcgaacccaggaggt

SEQ ID NO: 169398 - DNA, 15 bp, Homo sapiens
cgaacccaggaggtg

SEQ ID NO: 169399 - DNA, 15 bp, Homo sapiens
aggaggtggaggtta

SEQ ID NO: 169400 - DNA, 15 bp, Homo sapiens
ggaggtggaggttac

SEQ ID NO: 169401 - DNA, 15 bp, Homo sapiens
gaggtggaggttaca

SEQ ID NO: 169402 - DNA, 15 bp, Homo sapiens
aggtggaggttacag

SEQ ID NO: 169403 - DNA, 15 bp, Homo sapiens
ggtggaggttacagt

SEQ ID NO: 169404 - DNA, 15 bp, Homo sapiens
gtggaggttacagtg

SEQ ID NO: 169405 - DNA, 15 bp, Homo sapiens
tggaggttacagtga

SEQ ID NO: 169406 - DNA, 15 bp, Homo sapiens
ggaggttacagtgag

SEQ ID NO: 169407 - DNA, 15 bp, Homo sapiens
gaggttacagtgagc

SEQ ID NO: 169408 - DNA, 15 bp, Homo sapiens
aggttacagtgagcc

SEQ ID NO: 169409 - DNA, 15 bp, Homo sapiens
ggttacagtgagcca

SEQ ID NO: 169410 - DNA, 15 bp, Homo sapiens
gttacagtgagccaa

SEQ ID NO: 169411 - DNA, 15 bp, Homo sapiens
ttacagtgagccaag

SEQ ID NO: 169412 - DNA, 15 bp, Homo sapiens
tacagtgagccaagg

SEQ ID NO: 169413 - DNA, 15 bp, Homo sapiens
acagtgagccaaggt

SEQ ID NO: 169414 - DNA, 15 bp, Homo sapiens
agtgagccaaggtct

SEQ ID NO: 169415 - DNA, 15 bp, Homo sapiens
gtgagccaaggtctc

SEQ ID NO: 169416 - DNA, 15 bp, Homo sapiens
tgagccaaggtctcg

SEQ ID NO: 169417 - DNA, 15 bp, Homo sapiens
gagccaaggtctcgc

SEQ ID NO: 169418 - DNA, 15 bp, Homo sapiens
agccaaggtctcgcc

SEQ ID NO: 169419 - DNA, 15 bp, Homo sapiens
gccaaggtctcgcca

SEQ ID NO: 169420 - DNA, 15 bp, Homo sapiens
ccaaggtctcgccac

SEQ ID NO: 169421 - DNA, 15 bp, Homo sapiens
caaggtctcgccact

SEQ ID NO: 169422 - DNA, 15 bp, Homo sapiens
aaggtctcgccactg

SEQ ID NO: 169423 - DNA, 15 bp, Homo sapiens
aggtctcgccactgc

SEQ ID NO: 169424 - DNA, 15 bp, Homo sapiens
ggtctcgccactgca

SEQ ID NO: 169425 - DNA, 15 bp, Homo sapiens
gtctcgccactgcac

SEQ ID NO: 169426 - DNA, 15 bp, Homo sapiens
cactccagcctgggg

SEQ ID NO: 169427 - DNA, 15 bp, Homo sapiens
actccagcctgggga

SEQ ID NO: 169428 - DNA, 15 bp, Homo sapiens
ctccagcctggggac

SEQ ID NO: 169429 - DNA, 15 bp, Homo sapiens
tccagcctggggaca

SEQ ID NO: 169430 - DNA, 15 bp, Homo sapiens
ccagcctggggacag

SEQ ID NO: 169431 - DNA, 15 bp, Homo sapiens
cagcctggggacaga

SEQ ID NO: 169432 - DNA, 15 bp, Homo sapiens
agcctggggacagag

SEQ ID NO: 169433 - DNA, 15 bp, Homo sapiens
gcctggggacagagc

SEQ ID NO: 169434 - DNA, 15 bp, Homo sapiens
cctggggacagagca

SEQ ID NO: 169435 - DNA, 15 bp, Homo sapiens
ctggggacagagcaa

SEQ ID NO: 169436 - DNA, 15 bp, Homo sapiens
tggggacagagcaag

SEQ ID NO: 169437 - DNA, 15 bp, Homo sapiens
ggggacagagcaaga

SEQ ID NO: 169438 - DNA, 15 bp, Homo sapiens
gggacagagcaagac

SEQ ID NO: 169439 - DNA, 15 bp, Homo sapiens
ggacagagcaagacc

SEQ ID NO: 169440 - DNA, 15 bp, Homo sapiens
acagagcaagacccc

SEQ ID NO: 169441 - DNA, 15 bp, Homo sapiens
cagagcaagacccca

SEQ ID NO: 169442 - DNA, 15 bp, Homo sapiens
agagcaagaccccat

SEQ ID NO: 169443 - DNA, 15 bp, Homo sapiens
gagcaagaccccatt

SEQ ID NO: 169444 - DNA, 15 bp, Homo sapiens
agcaagaccccattt

SEQ ID NO: 169445 - DNA, 15 bp, Homo sapiens
gcaagaccccatttc

SEQ ID NO: 169446 - DNA, 15 bp, Homo sapiens
caagaccccatttca

SEQ ID NO: 169447 - DNA, 15 bp, Homo sapiens
aagaccccatttcaa

SEQ ID NO: 169448 - DNA, 15 bp, Homo sapiens
agaccccatttcaag

SEQ ID NO: 169449 - DNA, 15 bp, Homo sapiens
gaccccatttcaagg

SEQ ID NO: 169450 - DNA, 15 bp, Homo sapiens
accccatttcaaggg

SEQ ID NO: 169451 - DNA, 15 bp, Homo sapiens
ccccatttcaagggg

SEQ ID NO: 169452 - DNA, 15 bp, Homo sapiens
cccatttcaaggggg

SEQ ID NO: 169453 - DNA, 15 bp, Homo sapiens
ccatttcaagggggg

SEQ ID NO: 169454 - DNA, 15 bp, Homo sapiens
catttcaagggggga

SEQ ID NO: 169455 - DNA, 15 bp, Homo sapiens
atttcaaggggggaa

SEQ ID NO: 169456 - DNA, 15 bp, Homo sapiens
tttcaaggggggaaa

SEQ ID NO: 169457 - DNA, 15 bp, Homo sapiens
ttcaaggggggaaaa

SEQ ID NO: 169458 - DNA, 15 bp, Homo sapiens
tcaaggggggaaaaa

SEQ ID NO: 169459 - DNA, 15 bp, Homo sapiens
caaggggggaaaaaa

SEQ ID NO: 169460 - DNA, 15 bp, Homo sapiens
aaggggggaaaaaaa

SEQ ID NO: 169461 - DNA, 15 bp, Homo sapiens
aggggggaaaaaaag

SEQ ID NO: 169462 - DNA, 15 bp, Homo sapiens
ggggggaaaaaaagt

SEQ ID NO: 169463 - DNA, 15 bp, Homo sapiens
gggggaaaaaaagtc

SEQ ID NO: 169464 - DNA, 15 bp, Homo sapiens
ggggaaaaaaagtct

SEQ ID NO: 169465 - DNA, 15 bp, Homo sapiens
gggaaaaaaagtcta

SEQ ID NO: 169466 - DNA, 15 bp, Homo sapiens
ggaaaaaaagtctat

SEQ ID NO: 169467 - DNA, 15 bp, Homo sapiens
gaaaaaaagtctatt

SEQ ID NO: 169468 - DNA, 15 bp, Homo sapiens
aaaaaaagtctattt

SEQ ID NO: 169469 - DNA, 15 bp, Homo sapiens
aaaaaagtctatttt

SEQ ID NO: 169470 - DNA, 15 bp, Homo sapiens
aaaaagtctattttt

SEQ ID NO: 169471 - DNA, 15 bp, Homo sapiens
aaaagtctattttta

SEQ ID NO: 169472 - DNA, 15 bp, Homo sapiens
aaagtctatttttaa

SEQ ID NO: 169473 - DNA, 15 bp, Homo sapiens
aagtctatttttaag

SEQ ID NO: 169474 - DNA, 15 bp, Homo sapiens
agtctatttttaagt

SEQ ID NO: 169475 - DNA, 15 bp, Homo sapiens
gtctatttttaagtt

SEQ ID NO: 169476 - DNA, 15 bp, Homo sapiens
tctatttttaagttg

SEQ ID NO: 169477 - DNA, 15 bp, Homo sapiens
ctatttttaagttgt

SEQ ID NO: 169478 - DNA, 15 bp, Homo sapiens
tatttttaagttgtt

SEQ ID NO: 169479 - DNA, 15 bp, Homo sapiens
atttttaagttgtta

SEQ ID NO: 169480 - DNA, 15 bp, Homo sapiens
tttttaagttgttat

SEQ ID NO: 169481 - DNA, 15 bp, Homo sapiens
ttttaagttgttatt

SEQ ID NO: 169482 - DNA, 15 bp, Homo sapiens
tttaagttgttattg

SEQ ID NO: 169483 - DNA, 15 bp, Homo sapiens
ttaagttgttattgc

SEQ ID NO: 169484 - DNA, 15 bp, Homo sapiens
taagttgttattgct

SEQ ID NO: 169485 - DNA, 15 bp, Homo sapiens
aagttgttattgctt

SEQ ID NO: 169486 - DNA, 15 bp, Homo sapiens
agttgttattgcttt

SEQ ID NO: 169487 - DNA, 15 bp, Homo sapiens
gttgttattgctttt

SEQ ID NO: 169488 - DNA, 15 bp, Homo sapiens
ttgttattgcttttt

SEQ ID NO: 169489 - DNA, 15 bp, Homo sapiens
tgttattgctttttt

SEQ ID NO: 169490 - DNA, 15 bp, Homo sapiens
gttattgcttttttc

SEQ ID NO: 169491 - DNA, 15 bp, Homo sapiens
ttattgcttttttca

SEQ ID NO: 169492 - DNA, 15 bp, Homo sapiens
tattgcttttttcaa

SEQ ID NO: 169493 - DNA, 15 bp, Homo sapiens
attgcttttttcaag

SEQ ID NO: 169494 - DNA, 15 bp, Homo sapiens
ttgcttttttcaagt

SEQ ID NO: 169495 - DNA, 15 bp, Homo sapiens
tgcttttttcaagta

SEQ ID NO: 169496 - DNA, 15 bp, Homo sapiens
gcttttttcaagtat

SEQ ID NO: 169497 - DNA, 15 bp, Homo sapiens
cttttttcaagtatt

SEQ ID NO: 169498 - DNA, 15 bp, Homo sapiens
ttttttcaagtattc

SEQ ID NO: 169499 - DNA, 15 bp, Homo sapiens
tttttcaagtattct

SEQ ID NO: 169500 - DNA, 15 bp, Homo sapiens
ttttcaagtattctt

SEQ ID NO: 169501 - DNA, 15 bp, Homo sapiens
tttcaagtattcttc

SEQ ID NO: 169502 - DNA, 15 bp, Homo sapiens
ttcaagtattcttcc

SEQ ID NO: 169503 - DNA, 15 bp, Homo sapiens
tcaagtattcttccc

SEQ ID NO: 169504 - DNA, 15 bp, Homo sapiens
caagtattcttccct

SEQ ID NO: 169505 - DNA, 15 bp, Homo sapiens
aagtattcttccctc

SEQ ID NO: 169506 - DNA, 15 bp, Homo sapiens
agtattcttccctcc

SEQ ID NO: 169507 - DNA, 15 bp, Homo sapiens
gtattcttccctcct

SEQ ID NO: 169508 - DNA, 15 bp, Homo sapiens
tattcttccctcctt

SEQ ID NO: 169509 - DNA, 15 bp, Homo sapiens
attcttccctccttc

SEQ ID NO: 169510 - DNA, 15 bp, Homo sapiens
ttcttccctccttca

SEQ ID NO: 169511 - DNA, 15 bp, Homo sapiens
tcttccctccttcac

SEQ ID NO: 169512 - DNA, 15 bp, Homo sapiens
cttccctccttcaca

SEQ ID NO: 169513 - DNA, 15 bp, Homo sapiens
ttccctccttcacac

SEQ ID NO: 169514 - DNA, 15 bp, Homo sapiens
tccctccttcacaca

SEQ ID NO: 169515 - DNA, 15 bp, Homo sapiens
ccctccttcacacac

SEQ ID NO: 169516 - DNA, 15 bp, Homo sapiens
cctccttcacacaca

SEQ ID NO: 169517 - DNA, 15 bp, Homo sapiens
ctccttcacacacag

SEQ ID NO: 169518 - DNA, 15 bp, Homo sapiens
tccttcacacacagt

SEQ ID NO: 169519 - DNA, 15 bp, Homo sapiens
ccttcacacacagtt

SEQ ID NO: 169520 - DNA, 15 bp, Homo sapiens
cttcacacacagttt

SEQ ID NO: 169521 - DNA, 15 bp, Homo sapiens
ttcacacacagtttt

SEQ ID NO: 169522 - DNA, 15 bp, Homo sapiens
tcacacacagttttc

SEQ ID NO: 169523 - DNA, 15 bp, Homo sapiens
cacacacagttttct

SEQ ID NO: 169524 - DNA, 15 bp, Homo sapiens
acacacagttttcta

SEQ ID NO: 169525 - DNA, 15 bp, Homo sapiens
cacacagttttctag

SEQ ID NO: 169526 - DNA, 15 bp, Homo sapiens
acacagttttctagt

SEQ ID NO: 169527 - DNA, 15 bp, Homo sapiens
cacagttttctagtt

SEQ ID NO: 169528 - DNA, 15 bp, Homo sapiens
acagttttctagtta

SEQ ID NO: 169529 - DNA, 15 bp, Homo sapiens
cagttttctagttaa

SEQ ID NO: 169530 - DNA, 15 bp, Homo sapiens
agttttctagttaat

SEQ ID NO: 169531 - DNA, 15 bp, Homo sapiens
gttttctagttaatc

SEQ ID NO: 169532 - DNA, 15 bp, Homo sapiens
ttttctagttaatcc

SEQ ID NO: 169533 - DNA, 15 bp, Homo sapiens
tttctagttaatcca

SEQ ID NO: 169534 - DNA, 15 bp, Homo sapiens
ttctagttaatccat

SEQ ID NO: 169535 - DNA, 15 bp, Homo sapiens
tctagttaatccatt

SEQ ID NO: 169536 - DNA, 15 bp, Homo sapiens
ctagttaatccattt

SEQ ID NO: 169537 - DNA, 15 bp, Homo sapiens
tagttaatccattta

SEQ ID NO: 169538 - DNA, 15 bp, Homo sapiens
agttaatccatttat

SEQ ID NO: 169539 - DNA, 15 bp, Homo sapiens
gttaatccatttatg

SEQ ID NO: 169540 - DNA, 15 bp, Homo sapiens
ttaatccatttatgt

SEQ ID NO: 169541 - DNA, 15 bp, Homo sapiens
taatccatttatgta

SEQ ID NO: 169542 - DNA, 15 bp, Homo sapiens
aatccatttatgtaa

SEQ ID NO: 169543 - DNA, 15 bp, Homo sapiens
atccatttatgtaat

SEQ ID NO: 169544 - DNA, 15 bp, Homo sapiens
tccatttatgtaatt

SEQ ID NO: 169545 - DNA, 15 bp, Homo sapiens
ccatttatgtaattc

SEQ ID NO: 169546 - DNA, 15 bp, Homo sapiens
catttatgtaattct

SEQ ID NO: 169547 - DNA, 15 bp, Homo sapiens
atttatgtaattctg

SEQ ID NO: 169548 - DNA, 15 bp, Homo sapiens
tttatgtaattctgt

SEQ ID NO: 169549 - DNA, 15 bp, Homo sapiens
ttatgtaattctgta

SEQ ID NO: 169550 - DNA, 15 bp, Homo sapiens
tatgtaattctgtat

SEQ ID NO: 169551 - DNA, 15 bp, Homo sapiens
atgtaattctgtatg

SEQ ID NO: 169552 - DNA, 15 bp, Homo sapiens
tgtaattctgtatgc

SEQ ID NO: 169553 - DNA, 15 bp, Homo sapiens
gtaattctgtatgct

SEQ ID NO: 169554 - DNA, 15 bp, Homo sapiens
taattctgtatgctc

SEQ ID NO: 169555 - DNA, 15 bp, Homo sapiens
aattctgtatgctcc

SEQ ID NO: 169556 - DNA, 15 bp, Homo sapiens
attctgtatgctcct

SEQ ID NO: 169557 - DNA, 15 bp, Homo sapiens
ttctgtatgctccta

SEQ ID NO: 169558 - DNA, 15 bp, Homo sapiens
tctgtatgctcctac

SEQ ID NO: 169559 - DNA, 15 bp, Homo sapiens
ctgtatgctcctact

SEQ ID NO: 169560 - DNA, 15 bp, Homo sapiens
tgtatgctcctactt

SEQ ID NO: 169561 - DNA, 15 bp, Homo sapiens
gtatgctcctacttg

SEQ ID NO: 169562 - DNA, 15 bp, Homo sapiens
tatgctcctacttga

SEQ ID NO: 169563 - DNA, 15 bp, Homo sapiens
atgctcctacttgac

SEQ ID NO: 169564 - DNA, 15 bp, Homo sapiens
tgctcctacttgacc

SEQ ID NO: 169565 - DNA, 15 bp, Homo sapiens
gctcctacttgacct

SEQ ID NO: 169566 - DNA, 15 bp, Homo sapiens
ctcctacttgaccta

SEQ ID NO: 169567 - DNA, 15 bp, Homo sapiens
tcctacttgacctaa

SEQ ID NO: 169568 - DNA, 15 bp, Homo sapiens
cctacttgacctaat

SEQ ID NO: 169569 - DNA, 15 bp, Homo sapiens
ctacttgacctaatt

SEQ ID NO: 169570 - DNA, 15 bp, Homo sapiens
tacttgacctaattt

SEQ ID NO: 169571 - DNA, 15 bp, Homo sapiens
acttgacctaatttc

SEQ ID NO: 169572 - DNA, 15 bp, Homo sapiens
cttgacctaatttca

SEQ ID NO: 169573 - DNA, 15 bp, Homo sapiens
ttgacctaatttcaa

SEQ ID NO: 169574 - DNA, 15 bp, Homo sapiens
tgacctaatttcaac

SEQ ID NO: 169575 - DNA, 15 bp, Homo sapiens
gacctaatttcaaca

SEQ ID NO: 169576 - DNA, 15 bp, Homo sapiens
acctaatttcaacat

SEQ ID NO: 169577 - DNA, 15 bp, Homo sapiens
cctaatttcaacatc

SEQ ID NO: 169578 - DNA, 15 bp, Homo sapiens
ctaatttcaacatct

SEQ ID NO: 169579 - DNA, 15 bp, Homo sapiens
taatttcaacatctg

SEQ ID NO: 169580 - DNA, 15 bp, Homo sapiens
aatttcaacatctgg

SEQ ID NO: 169581 - DNA, 15 bp, Homo sapiens
atttcaacatctgga

SEQ ID NO: 169582 - DNA, 15 bp, Homo sapiens
tttcaacatctggaa

SEQ ID NO: 169583 - DNA, 15 bp, Homo sapiens
ttcaacatctggaaa

SEQ ID NO: 169584 - DNA, 15 bp, Homo sapiens
tcaacatctggaaaa

SEQ ID NO: 169585 - DNA, 15 bp, Homo sapiens
caacatctggaaaaa

SEQ ID NO: 169586 - DNA, 15 bp, Homo sapiens
aacatctggaaaaat

SEQ ID NO: 169587 - DNA, 15 bp, Homo sapiens
acatctggaaaaata

SEQ ID NO: 169588 - DNA, 15 bp, Homo sapiens
catctggaaaaatag

SEQ ID NO: 169589 - DNA, 15 bp, Homo sapiens
atctggaaaaataga

SEQ ID NO: 169590 - DNA, 15 bp, Homo sapiens
tctggaaaaatagaa

SEQ ID NO: 169591 - DNA, 15 bp, Homo sapiens
ctggaaaaatagaac

SEQ ID NO: 169592 - DNA, 15 bp, Homo sapiens
tggaaaaatagaact

SEQ ID NO: 169593 - DNA, 15 bp, Homo sapiens
ggaaaaatagaacta

SEQ ID NO: 169594 - DNA, 15 bp, Homo sapiens
gaaaaatagaactag

SEQ ID NO: 169595 - DNA, 15 bp, Homo sapiens
aaaaatagaactaga

SEQ ID NO: 169596 - DNA, 15 bp, Homo sapiens
aaaatagaactagaa

SEQ ID NO: 169597 - DNA, 15 bp, Homo sapiens
aaatagaactagaat

SEQ ID NO: 169598 - DNA, 15 bp, Homo sapiens
aatagaactagaata

SEQ ID NO: 169599 - DNA, 15 bp, Homo sapiens
atagaactagaataa

SEQ ID NO: 169600 - DNA, 15 bp, Homo sapiens
tagaactagaataaa

SEQ ID NO: 169601 - DNA, 15 bp, Homo sapiens
agaactagaataaag

SEQ ID NO: 169602 - DNA, 15 bp, Homo sapiens
gaactagaataaaga

SEQ ID NO: 169603 - DNA, 15 bp, Homo sapiens
aactagaataaagaa

SEQ ID NO: 169604 - DNA, 15 bp, Homo sapiens
actagaataaagaat

SEQ ID NO: 169605 - DNA, 15 bp, Homo sapiens
ctagaataaagaatg

SEQ ID NO: 169606 - DNA, 15 bp, Homo sapiens
tagaataaagaatga

SEQ ID NO: 169607 - DNA, 15 bp, Homo sapiens
agaataaagaatgag

SEQ ID NO: 169608 - DNA, 15 bp, Homo sapiens
gaataaagaatgagc

SEQ ID NO: 169609 - DNA, 15 bp, Homo sapiens
aataaagaatgagca

SEQ ID NO: 169610 - DNA, 15 bp, Homo sapiens
ataaagaatgagcaa

SEQ ID NO: 169611 - DNA, 15 bp, Homo sapiens
taaagaatgagcaag

SEQ ID NO: 169612 - DNA, 15 bp, Homo sapiens
aaagaatgagcaagt

SEQ ID NO: 169613 - DNA, 15 bp, Homo sapiens
aagaatgagcaagtt

SEQ ID NO: 169614 - DNA, 15 bp, Homo sapiens
agaatgagcaagttg

SEQ ID NO: 169615 - DNA, 15 bp, Homo sapiens
gaatgagcaagttga

SEQ ID NO: 169616 - DNA, 15 bp, Homo sapiens
aatgagcaagttgag

SEQ ID NO: 169617 - DNA, 15 bp, Homo sapiens
atgagcaagttgagt

SEQ ID NO: 169618 - DNA, 15 bp, Homo sapiens
tgagcaagttgagtg

SEQ ID NO: 169619 - DNA, 15 bp, Homo sapiens
gagcaagttgagtgg

SEQ ID NO: 169620 - DNA, 15 bp, Homo sapiens
agcaagttgagtggt

SEQ ID NO: 169621 - DNA, 15 bp, Homo sapiens
gcaagttgagtggta

SEQ ID NO: 169622 - DNA, 15 bp, Homo sapiens
caagttgagtggtat

SEQ ID NO: 169623 - DNA, 15 bp, Homo sapiens
aagttgagtggtatt

SEQ ID NO: 169624 - DNA, 15 bp, Homo sapiens
agttgagtggtattt

SEQ ID NO: 169625 - DNA, 15 bp, Homo sapiens
gttgagtggtattta

SEQ ID NO: 169626 - DNA, 15 bp, Homo sapiens
ttgagtggtatttat

SEQ ID NO: 169627 - DNA, 15 bp, Homo sapiens
tgagtggtatttata

SEQ ID NO: 169628 - DNA, 15 bp, Homo sapiens
gagtggtatttataa

SEQ ID NO: 169629 - DNA, 15 bp, Homo sapiens
agtggtatttataaa

SEQ ID NO: 169630 - DNA, 15 bp, Homo sapiens
gtggtatttataaag

SEQ ID NO: 169631 - DNA, 15 bp, Homo sapiens
tggtatttataaagg

SEQ ID NO: 169632 - DNA, 15 bp, Homo sapiens
ggtatttataaaggt

SEQ ID NO: 169633 - DNA, 15 bp, Homo sapiens
gtatttataaaggtc

SEQ ID NO: 169634 - DNA, 15 bp, Homo sapiens
tatttataaaggtcc

SEQ ID NO: 169635 - DNA, 15 bp, Homo sapiens
atttataaaggtcca

SEQ ID NO: 169636 - DNA, 15 bp, Homo sapiens
tttataaaggtccat

SEQ ID NO: 169637 - DNA, 15 bp, Homo sapiens
ttataaaggtccatc

SEQ ID NO: 169638 - DNA, 15 bp, Homo sapiens
tataaaggtccatct

SEQ ID NO: 169639 - DNA, 15 bp, Homo sapiens
ataaaggtccatctt

SEQ ID NO: 169640 - DNA, 15 bp, Homo sapiens
taaaggtccatctta

SEQ ID NO: 169641 - DNA, 15 bp, Homo sapiens
aaaggtccatcttaa

SEQ ID NO: 169642 - DNA, 15 bp, Homo sapiens
aaggtccatcttaat

SEQ ID NO: 169643 - DNA, 15 bp, Homo sapiens
aggtccatcttaatc

SEQ ID NO: 169644 - DNA, 15 bp, Homo sapiens
ggtccatcttaatct

SEQ ID NO: 169645 - DNA, 15 bp, Homo sapiens
gtccatcttaatctt

SEQ ID NO: 169646 - DNA, 15 bp, Homo sapiens
tccatcttaatcttt

SEQ ID NO: 169647 - DNA, 15 bp, Homo sapiens
ccatcttaatctttt

SEQ ID NO: 169648 - DNA, 15 bp, Homo sapiens
catcttaatctttta

SEQ ID NO: 169649 - DNA, 15 bp, Homo sapiens
atcttaatcttttaa

SEQ ID NO: 169650 - DNA, 15 bp, Homo sapiens
tcttaatcttttaac

SEQ ID NO: 169651 - DNA, 15 bp, Homo sapiens
cttaatcttttaaca

SEQ ID NO: 169652 - DNA, 15 bp, Homo sapiens
ttaatcttttaacag

SEQ ID NO: 169653 - DNA, 15 bp, Homo sapiens
taatcttttaacagg

SEQ ID NO: 169654 - DNA, 15 bp, Homo sapiens
aatcttttaacaggt

SEQ ID NO: 169655 - DNA, 15 bp, Homo sapiens
atcttttaacaggta

SEQ ID NO: 169656 - DNA, 15 bp, Homo sapiens
tcttttaacaggtat

SEQ ID NO: 169657 - DNA, 15 bp, Homo sapiens
cttttaacaggtatt

SEQ ID NO: 169658 - DNA, 15 bp, Homo sapiens
ttttaacaggtattt

SEQ ID NO: 169659 - DNA, 15 bp, Homo sapiens
tttaacaggtatttg

SEQ ID NO: 169660 - DNA, 15 bp, Homo sapiens
ttaacaggtatttgt

SEQ ID NO: 169661 - DNA, 15 bp, Homo sapiens
taacaggtatttgtg

SEQ ID NO: 169662 - DNA, 15 bp, Homo sapiens
aacaggtatttgtga

SEQ ID NO: 169663 - DNA, 15 bp, Homo sapiens
acaggtatttgtgaa

SEQ ID NO: 169664 - DNA, 15 bp, Homo sapiens
caggtatttgtgaac

SEQ ID NO: 169665 - DNA, 15 bp, Homo sapiens
aggtatttgtgaact

SEQ ID NO: 169666 - DNA, 15 bp, Homo sapiens
ggtatttgtgaactt

SEQ ID NO: 169667 - DNA, 15 bp, Homo sapiens
gtatttgtgaacttt

SEQ ID NO: 169668 - DNA, 15 bp, Homo sapiens
tatttgtgaactttg

SEQ ID NO: 169669 - DNA, 15 bp, Homo sapiens
atttgtgaactttgc

SEQ ID NO: 169670 - DNA, 15 bp, Homo sapiens
tttgtgaactttgcc

SEQ ID NO: 169671 - DNA, 15 bp, Homo sapiens
ttgtgaactttgcca

SEQ ID NO: 169672 - DNA, 15 bp, Homo sapiens
tgtgaactttgccaa

SEQ ID NO: 169673 - DNA, 15 bp, Homo sapiens
gtgaactttgccaag

SEQ ID NO: 169674 - DNA, 15 bp, Homo sapiens
tgaactttgccaagg

SEQ ID NO: 169675 - DNA, 15 bp, Homo sapiens
gaactttgccaagga

SEQ ID NO: 169676 - DNA, 15 bp, Homo sapiens
aactttgccaaggac

SEQ ID NO: 169677 - DNA, 15 bp, Homo sapiens
actttgccaaggacc

SEQ ID NO: 169678 - DNA, 15 bp, Homo sapiens
ctttgccaaggacca

SEQ ID NO: 169679 - DNA, 15 bp, Homo sapiens
tttgccaaggaccaa

SEQ ID NO: 169680 - DNA, 15 bp, Homo sapiens
ttgccaaggaccaaa

SEQ ID NO: 169681 - DNA, 15 bp, Homo sapiens
tgccaaggaccaaag

SEQ ID NO: 169682 - DNA, 15 bp, Homo sapiens
gccaaggaccaaagt

SEQ ID NO: 169683 - DNA, 15 bp, Homo sapiens
ccaaggaccaaagtg

SEQ ID NO: 169684 - DNA, 15 bp, Homo sapiens
caaggaccaaagtga

SEQ ID NO: 169685 - DNA, 15 bp, Homo sapiens
aaggaccaaagtgat

SEQ ID NO: 169686 - DNA, 15 bp, Homo sapiens
aggaccaaagtgatg

SEQ ID NO: 169687 - DNA, 15 bp, Homo sapiens
ggaccaaagtgatga

SEQ ID NO: 169688 - DNA, 15 bp, Homo sapiens
gaccaaagtgatgat

SEQ ID NO: 169689 - DNA, 15 bp, Homo sapiens
accaaagtgatgatg

SEQ ID NO: 169690 - DNA, 15 bp, Homo sapiens
ccaaagtgatgatga

SEQ ID NO: 169691 - DNA, 15 bp, Homo sapiens
caaagtgatgatgac

SEQ ID NO: 169692 - DNA, 15 bp, Homo sapiens
aaagtgatgatgacc

SEQ ID NO: 169693 - DNA, 15 bp, Homo sapiens
aagtgatgatgacca

SEQ ID NO: 169694 - DNA, 15 bp, Homo sapiens
agtgatgatgaccac

SEQ ID NO: 169695 - DNA, 15 bp, Homo sapiens
gtgatgatgaccact

SEQ ID NO: 169696 - DNA, 15 bp, Homo sapiens
tgatgatgaccactt

SEQ ID NO: 169697 - DNA, 15 bp, Homo sapiens
gatgatgaccactta

SEQ ID NO: 169698 - DNA, 15 bp, Homo sapiens
atgatgaccacttaa

SEQ ID NO: 169699 - DNA, 15 bp, Homo sapiens
tgatgaccacttaaa

SEQ ID NO: 169700 - DNA, 15 bp, Homo sapiens
gatgaccacttaaaa

SEQ ID NO: 169701 - DNA, 15 bp, Homo sapiens
atgaccacttaaaag

SEQ ID NO: 169702 - DNA, 15 bp, Homo sapiens
tgaccacttaaaaga

SEQ ID NO: 169703 - DNA, 15 bp, Homo sapiens
gaccacttaaaagac

SEQ ID NO: 169704 - DNA, 15 bp, Homo sapiens
accacttaaaagacc

SEQ ID NO: 169705 - DNA, 15 bp, Homo sapiens
ccacttaaaagacct

SEQ ID NO: 169706 - DNA, 15 bp, Homo sapiens
cacttaaaagacctc

SEQ ID NO: 169707 - DNA, 15 bp, Homo sapiens
acttaaaagacctct

SEQ ID NO: 169708 - DNA, 15 bp, Homo sapiens
cttaaaagacctctc

SEQ ID NO: 169709 - DNA, 15 bp, Homo sapiens
ttaaaagacctctca

SEQ ID NO: 169710 - DNA, 15 bp, Homo sapiens
taaaagacctctcat

SEQ ID NO: 169711 - DNA, 15 bp, Homo sapiens
aaaagacctctcatt

SEQ ID NO: 169712 - DNA, 15 bp, Homo sapiens
aaagacctctcatta

SEQ ID NO: 169713 - DNA, 15 bp, Homo sapiens
aagacctctcattac

SEQ ID NO: 169714 - DNA, 15 bp, Homo sapiens
agacctctcattaca

SEQ ID NO: 169715 - DNA, 15 bp, Homo sapiens
gacctctcattacac

SEQ ID NO: 169716 - DNA, 15 bp, Homo sapiens
acctctcattacaca

SEQ ID NO: 169717 - DNA, 15 bp, Homo sapiens
cctctcattacacaa

SEQ ID NO: 169718 - DNA, 15 bp, Homo sapiens
ctctcattacacaaa

SEQ ID NO: 169719 - DNA, 15 bp, Homo sapiens
tctcattacacaaaa

SEQ ID NO: 169720 - DNA, 15 bp, Homo sapiens
ctcattacacaaaaa

SEQ ID NO: 169721 - DNA, 15 bp, Homo sapiens
tcattacacaaaaac

SEQ ID NO: 169722 - DNA, 15 bp, Homo sapiens
cattacacaaaaacc

SEQ ID NO: 169723 - DNA, 15 bp, Homo sapiens
attacacaaaaacca

SEQ ID NO: 169724 - DNA, 15 bp, Homo sapiens
ttacacaaaaaccag

SEQ ID NO: 169725 - DNA, 15 bp, Homo sapiens
tacacaaaaaccaga

SEQ ID NO: 169726 - DNA, 15 bp, Homo sapiens
acacaaaaaccagac

SEQ ID NO: 169727 - DNA, 15 bp, Homo sapiens
cacaaaaaccagaca

SEQ ID NO: 169728 - DNA, 15 bp, Homo sapiens
acaaaaaccagacag

SEQ ID NO: 169729 - DNA, 15 bp, Homo sapiens
caaaaaccagacagt

SEQ ID NO: 169730 - DNA, 15 bp, Homo sapiens
aaaaaccagacagta

SEQ ID NO: 169731 - DNA, 15 bp, Homo sapiens
aaaaccagacagtag

SEQ ID NO: 169732 - DNA, 15 bp, Homo sapiens
aaaccagacagtagt

SEQ ID NO: 169733 - DNA, 15 bp, Homo sapiens
aaccagacagtagtg

SEQ ID NO: 169734 - DNA, 15 bp, Homo sapiens
accagacagtagtgg

SEQ ID NO: 169735 - DNA, 15 bp, Homo sapiens
ccagacagtagtgga

SEQ ID NO: 169736 - DNA, 15 bp, Homo sapiens
cagacagtagtggac

SEQ ID NO: 169737 - DNA, 15 bp, Homo sapiens
agacagtagtggacg

SEQ ID NO: 169738 - DNA, 15 bp, Homo sapiens
gacagtagtggacgt

SEQ ID NO: 169739 - DNA, 15 bp, Homo sapiens
acagtagtggacgtt

SEQ ID NO: 169740 - DNA, 15 bp, Homo sapiens
cagtagtggacgttg

SEQ ID NO: 169741 - DNA, 15 bp, Homo sapiens
agtagtggacgttgc

SEQ ID NO: 169742 - DNA, 15 bp, Homo sapiens
gtagtggacgttgca

SEQ ID NO: 169743 - DNA, 15 bp, Homo sapiens
tagtggacgttgcag

SEQ ID NO: 169744 - DNA, 15 bp, Homo sapiens
agtggacgttgcagt

SEQ ID NO: 169745 - DNA, 15 bp, Homo sapiens
gtggacgttgcagtt

SEQ ID NO: 169746 - DNA, 15 bp, Homo sapiens
tggacgttgcagttc

SEQ ID NO: 169747 - DNA, 15 bp, Homo sapiens
ggacgttgcagttct

SEQ ID NO: 169748 - DNA, 15 bp, Homo sapiens
gacgttgcagttctc

SEQ ID NO: 169749 - DNA, 15 bp, Homo sapiens
acgttgcagttctca

SEQ ID NO: 169750 - DNA, 15 bp, Homo sapiens
cgttgcagttctcac

SEQ ID NO: 169751 - DNA, 15 bp, Homo sapiens
gttgcagttctcaca

SEQ ID NO: 169752 - DNA, 15 bp, Homo sapiens
ttgcagttctcacat

SEQ ID NO: 169753 - DNA, 15 bp, Homo sapiens
tgcagttctcacatc

SEQ ID NO: 169754 - DNA, 15 bp, Homo sapiens
gcagttctcacatct

SEQ ID NO: 169755 - DNA, 15 bp, Homo sapiens
cagttctcacatctt

SEQ ID NO: 169756 - DNA, 15 bp, Homo sapiens
agttctcacatcttt

SEQ ID NO: 169757 - DNA, 15 bp, Homo sapiens
gttctcacatctttt

SEQ ID NO: 169758 - DNA, 15 bp, Homo sapiens
ttctcacatcttttc

SEQ ID NO: 169759 - DNA, 15 bp, Homo sapiens
tctcacatcttttct

SEQ ID NO: 169760 - DNA, 15 bp, Homo sapiens
ctcacatcttttcta

SEQ ID NO: 169761 - DNA, 15 bp, Homo sapiens
tcacatcttttctac

SEQ ID NO: 169762 - DNA, 15 bp, Homo sapiens
cacatcttttctaca

SEQ ID NO: 169763 - DNA, 15 bp, Homo sapiens
acatcttttctacag

SEQ ID NO: 169764 - DNA, 15 bp, Homo sapiens
catcttttctacagg

SEQ ID NO: 169765 - DNA, 15 bp, Homo sapiens
atcttttctacagga

SEQ ID NO: 169766 - DNA, 15 bp, Homo sapiens
tcttttctacaggat

SEQ ID NO: 169767 - DNA, 15 bp, Homo sapiens
cttttctacaggatg

SEQ ID NO: 169768 - DNA, 15 bp, Homo sapiens
ttttctacaggatga

SEQ ID NO: 169769 - DNA, 15 bp, Homo sapiens
tttctacaggatgag

SEQ ID NO: 169770 - DNA, 15 bp, Homo sapiens
ttctacaggatgaga

SEQ ID NO: 169771 - DNA, 15 bp, Homo sapiens
tctacaggatgagaa

SEQ ID NO: 169772 - DNA, 15 bp, Homo sapiens
ctacaggatgagaaa

SEQ ID NO: 169773 - DNA, 15 bp, Homo sapiens
tacaggatgagaaag

SEQ ID NO: 169774 - DNA, 15 bp, Homo sapiens
acaggatgagaaagt

SEQ ID NO: 169775 - DNA, 15 bp, Homo sapiens
caggatgagaaagtg

SEQ ID NO: 169776 - DNA, 15 bp, Homo sapiens
aggatgagaaagtga

SEQ ID NO: 169777 - DNA, 15 bp, Homo sapiens
ggatgagaaagtgaa

SEQ ID NO: 169778 - DNA, 15 bp, Homo sapiens
gatgagaaagtgaaa

SEQ ID NO: 169779 - DNA, 15 bp, Homo sapiens
atgagaaagtgaaag

SEQ ID NO: 169780 - DNA, 15 bp, Homo sapiens
tgagaaagtgaaaga

SEQ ID NO: 169781 - DNA, 15 bp, Homo sapiens
gagaaagtgaaagaa

SEQ ID NO: 169782 - DNA, 15 bp, Homo sapiens
agaaagtgaaagaaa

SEQ ID NO: 169783 - DNA, 15 bp, Homo sapiens
gaaagtgaaagaaag

SEQ ID NO: 169784 - DNA, 15 bp, Homo sapiens
aaagtgaaagaaagc

SEQ ID NO: 169785 - DNA, 15 bp, Homo sapiens
aagtgaaagaaagct

SEQ ID NO: 169786 - DNA, 15 bp, Homo sapiens
agtgaaagaaagcta

SEQ ID NO: 169787 - DNA, 15 bp, Homo sapiens
gtgaaagaaagctat

SEQ ID NO: 169788 - DNA, 15 bp, Homo sapiens
tgaaagaaagctatg

SEQ ID NO: 169789 - DNA, 15 bp, Homo sapiens
gaaagaaagctatgt

SEQ ID NO: 169790 - DNA, 15 bp, Homo sapiens
aaagaaagctatgta

SEQ ID NO: 169791 - DNA, 15 bp, Homo sapiens
aagaaagctatgtat

SEQ ID NO: 169792 - DNA, 15 bp, Homo sapiens
agaaagctatgtatg

SEQ ID NO: 169793 - DNA, 15 bp, Homo sapiens
gaaagctatgtatga

SEQ ID NO: 169794 - DNA, 15 bp, Homo sapiens
aaagctatgtatgaa

SEQ ID NO: 169795 - DNA, 15 bp, Homo sapiens
aagctatgtatgaag

SEQ ID NO: 169796 - DNA, 15 bp, Homo sapiens
agctatgtatgaaga

SEQ ID NO: 169797 - DNA, 15 bp, Homo sapiens
gctatgtatgaagaa

SEQ ID NO: 169798 - DNA, 15 bp, Homo sapiens
ctatgtatgaagaat

SEQ ID NO: 169799 - DNA, 15 bp, Homo sapiens
tatgtatgaagaatc

SEQ ID NO: 169800 - DNA, 15 bp, Homo sapiens
atgtatgaagaatcc

SEQ ID NO: 169801 - DNA, 15 bp, Homo sapiens
tgtatgaagaatcct

SEQ ID NO: 169802 - DNA, 15 bp, Homo sapiens
gtatgaagaatcctg

SEQ ID NO: 169803 - DNA, 15 bp, Homo sapiens
tatgaagaatcctgt

SEQ ID NO: 169804 - DNA, 15 bp, Homo sapiens
atgaagaatcctgtt

SEQ ID NO: 169805 - DNA, 15 bp, Homo sapiens
tgaagaatcctgttc

SEQ ID NO: 169806 - DNA, 15 bp, Homo sapiens
gaagaatcctgttca

SEQ ID NO: 169807 - DNA, 15 bp, Homo sapiens
aagaatcctgttcat

SEQ ID NO: 169808 - DNA, 15 bp, Homo sapiens
agaatcctgttcata

SEQ ID NO: 169809 - DNA, 15 bp, Homo sapiens
gaatcctgttcatac

SEQ ID NO: 169810 - DNA, 15 bp, Homo sapiens
aatcctgttcatacg

SEQ ID NO: 169811 - DNA, 15 bp, Homo sapiens
atcctgttcatacgg

SEQ ID NO: 169812 - DNA, 15 bp, Homo sapiens
tcctgttcatacggg

SEQ ID NO: 169813 - DNA, 15 bp, Homo sapiens
cctgttcatacgggg

SEQ ID NO: 169814 - DNA, 15 bp, Homo sapiens
ctgttcatacggggt

SEQ ID NO: 169815 - DNA, 15 bp, Homo sapiens
tgttcatacggggtg

SEQ ID NO: 169816 - DNA, 15 bp, Homo sapiens
gttcatacggggtgg

SEQ ID NO: 169817 - DNA, 15 bp, Homo sapiens
ttcatacggggtggc

SEQ ID NO: 169818 - DNA, 15 bp, Homo sapiens
tcatacggggtggct

SEQ ID NO: 169819 - DNA, 15 bp, Homo sapiens
catacggggtggctg

SEQ ID NO: 169820 - DNA, 15 bp, Homo sapiens
atacggggtggctga

SEQ ID NO: 169821 - DNA, 15 bp, Homo sapiens
tacggggtggctgaa

SEQ ID NO: 169822 - DNA, 15 bp, Homo sapiens
acggggtggctgaaa

SEQ ID NO: 169823 - DNA, 15 bp, Homo sapiens
cggggtggctgaaag

SEQ ID NO: 169824 - DNA, 15 bp, Homo sapiens
ggggtggctgaaagt

SEQ ID NO: 169825 - DNA, 15 bp, Homo sapiens
gggtggctgaaagta

SEQ ID NO: 169826 - DNA, 15 bp, Homo sapiens
ggtggctgaaagtaa

SEQ ID NO: 169827 - DNA, 15 bp, Homo sapiens
gtggctgaaagtaaa

SEQ ID NO: 169828 - DNA, 15 bp, Homo sapiens
tggctgaaagtaaag

SEQ ID NO: 169829 - DNA, 15 bp, Homo sapiens
ggctgaaagtaaaga

SEQ ID NO: 169830 - DNA, 15 bp, Homo sapiens
gctgaaagtaaagag

SEQ ID NO: 169831 - DNA, 15 bp, Homo sapiens
ctgaaagtaaagagg

SEQ ID NO: 169832 - DNA, 15 bp, Homo sapiens
tgaaagtaaagagga

SEQ ID NO: 169833 - DNA, 15 bp, Homo sapiens
gaaagtaaagaggaa

SEQ ID NO: 169834 - DNA, 15 bp, Homo sapiens
aaagtaaagaggaac

SEQ ID NO: 169835 - DNA, 15 bp, Homo sapiens
aagtaaagaggaact

SEQ ID NO: 169836 - DNA, 15 bp, Homo sapiens
agtaaagaggaacta

SEQ ID NO: 169837 - DNA, 15 bp, Homo sapiens
gtaaagaggaactag

SEQ ID NO: 169838 - DNA, 15 bp, Homo sapiens
taaagaggaactaga

SEQ ID NO: 169839 - DNA, 15 bp, Homo sapiens
aaagaggaactagac

SEQ ID NO: 169840 - DNA, 15 bp, Homo sapiens
aagaggaactagact

SEQ ID NO: 169841 - DNA, 15 bp, Homo sapiens
agaggaactagactt

SEQ ID NO: 169842 - DNA, 15 bp, Homo sapiens
gaggaactagacttt

SEQ ID NO: 169843 - DNA, 15 bp, Homo sapiens
aggaactagactttc

SEQ ID NO: 169844 - DNA, 15 bp, Homo sapiens
ggaactagactttcc

SEQ ID NO: 169845 - DNA, 15 bp, Homo sapiens
gaactagactttcct

SEQ ID NO: 169846 - DNA, 15 bp, Homo sapiens
aactagactttcctt

SEQ ID NO: 169847 - DNA, 15 bp, Homo sapiens
actagactttccttt

SEQ ID NO: 169848 - DNA, 15 bp, Homo sapiens
ctagactttcctttg

SEQ ID NO: 169849 - DNA, 15 bp, Homo sapiens
tagactttcctttgc

SEQ ID NO: 169850 - DNA, 15 bp, Homo sapiens
agactttcctttgca

SEQ ID NO: 169851 - DNA, 15 bp, Homo sapiens
gactttcctttgcac

SEQ ID NO: 169852 - DNA, 15 bp, Homo sapiens
actttcctttgcacc

SEQ ID NO: 169853 - DNA, 15 bp, Homo sapiens
ctttcctttgcacca

SEQ ID NO: 169854 - DNA, 15 bp, Homo sapiens
tttcctttgcaccat

SEQ ID NO: 169855 - DNA, 15 bp, Homo sapiens
ttcctttgcaccatg

SEQ ID NO: 169856 - DNA, 15 bp, Homo sapiens
tcctttgcaccatgt

SEQ ID NO: 169857 - DNA, 15 bp, Homo sapiens
cctttgcaccatgtg

SEQ ID NO: 169858 - DNA, 15 bp, Homo sapiens
ctttgcaccatgtga

SEQ ID NO: 169859 - DNA, 15 bp, Homo sapiens
tttgcaccatgtgaa

SEQ ID NO: 169860 - DNA, 15 bp, Homo sapiens
ttgcaccatgtgaag

SEQ ID NO: 169861 - DNA, 15 bp, Homo sapiens
tgcaccatgtgaagt

SEQ ID NO: 169862 - DNA, 15 bp, Homo sapiens
gcaccatgtgaagtg

SEQ ID NO: 169863 - DNA, 15 bp, Homo sapiens
caccatgtgaagtgt

SEQ ID NO: 169864 - DNA, 15 bp, Homo sapiens
accatgtgaagtgtt

SEQ ID NO: 169865 - DNA, 15 bp, Homo sapiens
ccatgtgaagtgttg

SEQ ID NO: 169866 - DNA, 15 bp, Homo sapiens
catgtgaagtgttgt

SEQ ID NO: 169867 - DNA, 15 bp, Homo sapiens
atgtgaagtgttgtg

SEQ ID NO: 169868 - DNA, 15 bp, Homo sapiens
tgtgaagtgttgtgg

SEQ ID NO: 169869 - DNA, 15 bp, Homo sapiens
gtgaagtgttgtgga

SEQ ID NO: 169870 - DNA, 15 bp, Homo sapiens
tgaagtgttgtggag

SEQ ID NO: 169871 - DNA, 15 bp, Homo sapiens
gaagtgttgtggaga

SEQ ID NO: 169872 - DNA, 15 bp, Homo sapiens
aagtgttgtggagaa

SEQ ID NO: 169873 - DNA, 15 bp, Homo sapiens
agtgttgtggagaaa

SEQ ID NO: 169874 - DNA, 15 bp, Homo sapiens
gtgttgtggagaaaa

SEQ ID NO: 169875 - DNA, 15 bp, Homo sapiens
tgttgtggagaaaag

SEQ ID NO: 169876 - DNA, 15 bp, Homo sapiens
gttgtggagaaaaga

SEQ ID NO: 169877 - DNA, 15 bp, Homo sapiens
ttgtggagaaaagag

SEQ ID NO: 169878 - DNA, 15 bp, Homo sapiens
tgtggagaaaagagc

SEQ ID NO: 169879 - DNA, 15 bp, Homo sapiens
gtggagaaaagagcc

SEQ ID NO: 169880 - DNA, 15 bp, Homo sapiens
tggagaaaagagcca

SEQ ID NO: 169881 - DNA, 15 bp, Homo sapiens
ggagaaaagagccag

SEQ ID NO: 169882 - DNA, 15 bp, Homo sapiens
gagaaaagagccaga

SEQ ID NO: 169883 - DNA, 15 bp, Homo sapiens
agaaaagagccagaa

SEQ ID NO: 169884 - DNA, 15 bp, Homo sapiens
gaaaagagccagaag

SEQ ID NO: 169885 - DNA, 15 bp, Homo sapiens
aaaagagccagaagt

SEQ ID NO: 169886 - DNA, 15 bp, Homo sapiens
aaagagccagaagtt

SEQ ID NO: 169887 - DNA, 15 bp, Homo sapiens
aagagccagaagttg

SEQ ID NO: 169888 - DNA, 15 bp, Homo sapiens
agagccagaagttga

SEQ ID NO: 169889 - DNA, 15 bp, Homo sapiens
gagccagaagttgat

SEQ ID NO: 169890 - DNA, 15 bp, Homo sapiens
agccagaagttgatg

SEQ ID NO: 169891 - DNA, 15 bp, Homo sapiens
gccagaagttgatgt

SEQ ID NO: 169892 - DNA, 15 bp, Homo sapiens
ccagaagttgatgtg

SEQ ID NO: 169893 - DNA, 15 bp, Homo sapiens
cagaagttgatgtgg

SEQ ID NO: 169894 - DNA, 15 bp, Homo sapiens
agaagttgatgtggg

SEQ ID NO: 169895 - DNA, 15 bp, Homo sapiens
gaagttgatgtggga

SEQ ID NO: 169896 - DNA, 15 bp, Homo sapiens
aagttgatgtgggaa

SEQ ID NO: 169897 - DNA, 15 bp, Homo sapiens
agttgatgtgggaag

SEQ ID NO: 169898 - DNA, 15 bp, Homo sapiens
gttgatgtgggaaga

SEQ ID NO: 169899 - DNA, 15 bp, Homo sapiens
ttgatgtgggaagaa

SEQ ID NO: 169900 - DNA, 15 bp, Homo sapiens
tgatgtgggaagaag

SEQ ID NO: 169901 - DNA, 15 bp, Homo sapiens
gatgtgggaagaagt

SEQ ID NO: 169902 - DNA, 15 bp, Homo sapiens
atgtgggaagaagta

SEQ ID NO: 169903 - DNA, 15 bp, Homo sapiens
tgtgggaagaagtaa

SEQ ID NO: 169904 - DNA, 15 bp, Homo sapiens
gtgggaagaagtaaa

SEQ ID NO: 169905 - DNA, 15 bp, Homo sapiens
tgggaagaagtaaac

SEQ ID NO: 169906 - DNA, 15 bp, Homo sapiens
gggaagaagtaaact

SEQ ID NO: 169907 - DNA, 15 bp, Homo sapiens
ggaagaagtaaactg

SEQ ID NO: 169908 - DNA, 15 bp, Homo sapiens
gaagaagtaaactgg

SEQ ID NO: 169909 - DNA, 15 bp, Homo sapiens
aagaagtaaactgga

SEQ ID NO: 169910 - DNA, 15 bp, Homo sapiens
agaagtaaactggat

SEQ ID NO: 169911 - DNA, 15 bp, Homo sapiens
gaagtaaactggata

SEQ ID NO: 169912 - DNA, 15 bp, Homo sapiens
aagtaaactggatac

SEQ ID NO: 169913 - DNA, 15 bp, Homo sapiens
agtaaactggatact

SEQ ID NO: 169914 - DNA, 15 bp, Homo sapiens
gtaaactggatactg

SEQ ID NO: 169915 - DNA, 15 bp, Homo sapiens
taaactggatactgt

SEQ ID NO: 169916 - DNA, 15 bp, Homo sapiens
aaactggatactgta

SEQ ID NO: 169917 - DNA, 15 bp, Homo sapiens
aactggatactgtac

SEQ ID NO: 169918 - DNA, 15 bp, Homo sapiens
actggatactgtact

SEQ ID NO: 169919 - DNA, 15 bp, Homo sapiens
ctggatactgtactg

SEQ ID NO: 169920 - DNA, 15 bp, Homo sapiens
tggatactgtactga

SEQ ID NO: 169921 - DNA, 15 bp, Homo sapiens
ggatactgtactgat

SEQ ID NO: 169922 - DNA, 15 bp, Homo sapiens
gatactgtactgata

SEQ ID NO: 169923 - DNA, 15 bp, Homo sapiens
atactgtactgatac

SEQ ID NO: 169924 - DNA, 15 bp, Homo sapiens
tactgtactgatact

SEQ ID NO: 169925 - DNA, 15 bp, Homo sapiens
actgtactgatacta

SEQ ID NO: 169926 - DNA, 15 bp, Homo sapiens
ctgtactgatactat

SEQ ID NO: 169927 - DNA, 15 bp, Homo sapiens
tgtactgatactatt

SEQ ID NO: 169928 - DNA, 15 bp, Homo sapiens
gtactgatactattc

SEQ ID NO: 169929 - DNA, 15 bp, Homo sapiens
tactgatactattca

SEQ ID NO: 169930 - DNA, 15 bp, Homo sapiens
actgatactattcaa

SEQ ID NO: 169931 - DNA, 15 bp, Homo sapiens
ctgatactattcaat

SEQ ID NO: 169932 - DNA, 15 bp, Homo sapiens
tgatactattcaatg

SEQ ID NO: 169933 - DNA, 15 bp, Homo sapiens
gatactattcaatgc

SEQ ID NO: 169934 - DNA, 15 bp, Homo sapiens
atactattcaatgca

SEQ ID NO: 169935 - DNA, 15 bp, Homo sapiens
tactattcaatgcaa

SEQ ID NO: 169936 - DNA, 15 bp, Homo sapiens
actattcaatgcaat

SEQ ID NO: 169937 - DNA, 15 bp, Homo sapiens
ctattcaatgcaatg

SEQ ID NO: 169938 - DNA, 15 bp, Homo sapiens
tattcaatgcaatgc

SEQ ID NO: 169939 - DNA, 15 bp, Homo sapiens
attcaatgcaatgca

SEQ ID NO: 169940 - DNA, 15 bp, Homo sapiens
ttcaatgcaatgcaa

SEQ ID NO: 169941 - DNA, 15 bp, Homo sapiens
tcaatgcaatgcaat

SEQ ID NO: 169942 - DNA, 15 bp, Homo sapiens
caatgcaatgcaatt

SEQ ID NO: 169943 - DNA, 15 bp, Homo sapiens
aatgcaatgcaattc

SEQ ID NO: 169944 - DNA, 15 bp, Homo sapiens
atgcaatgcaattca

SEQ ID NO: 169945 - DNA, 15 bp, Homo sapiens
tgcaatgcaattcaa

SEQ ID NO: 169946 - DNA, 15 bp, Homo sapiens
gcaatgcaattcaat

SEQ ID NO: 169947 - DNA, 15 bp, Homo sapiens
caatgcaattcaatg

SEQ ID NO: 169948 - DNA, 15 bp, Homo sapiens
aatgcaattcaatgc

SEQ ID NO: 169949 - DNA, 15 bp, Homo sapiens
atgcaattcaatgca

SEQ ID NO: 169950 - DNA, 15 bp, Homo sapiens
tgcaattcaatgcaa

SEQ ID NO: 169951 - DNA, 15 bp, Homo sapiens
gcaattcaatgcaat

SEQ ID NO: 169952 - DNA, 15 bp, Homo sapiens
caattcaatgcaatg

SEQ ID NO: 169953 - DNA, 15 bp, Homo sapiens
aattcaatgcaatga

SEQ ID NO: 169954 - DNA, 15 bp, Homo sapiens
attcaatgcaatgaa

SEQ ID NO: 169955 - DNA, 15 bp, Homo sapiens
ttcaatgcaatgaaa

SEQ ID NO: 169956 - DNA, 15 bp, Homo sapiens
tcaatgcaatgaaaa

SEQ ID NO: 169957 - DNA, 15 bp, Homo sapiens
caatgcaatgaaaac

SEQ ID NO: 169958 - DNA, 15 bp, Homo sapiens
aatgcaatgaaaaca

SEQ ID NO: 169959 - DNA, 15 bp, Homo sapiens
atgcaatgaaaacaa

SEQ ID NO: 169960 - DNA, 15 bp, Homo sapiens
tgcaatgaaaacaaa

SEQ ID NO: 169961 - DNA, 15 bp, Homo sapiens
gcaatgaaaacaaaa

SEQ ID NO: 169962 - DNA, 15 bp, Homo sapiens
caatgaaaacaaaat

SEQ ID NO: 169963 - DNA, 15 bp, Homo sapiens
aatgaaaacaaaatt

SEQ ID NO: 169964 - DNA, 15 bp, Homo sapiens
atgaaaacaaaattc

SEQ ID NO: 169965 - DNA, 15 bp, Homo sapiens
tgaaaacaaaattcc

SEQ ID NO: 169966 - DNA, 15 bp, Homo sapiens
gaaaacaaaattcca

SEQ ID NO: 169967 - DNA, 15 bp, Homo sapiens
aaaacaaaattccat

SEQ ID NO: 169968 - DNA, 15 bp, Homo sapiens
aaacaaaattccatt

SEQ ID NO: 169969 - DNA, 15 bp, Homo sapiens
aacaaaattccatta

SEQ ID NO: 169970 - DNA, 15 bp, Homo sapiens
acaaaattccattac

SEQ ID NO: 169971 - DNA, 15 bp, Homo sapiens
caaaattccattaca

SEQ ID NO: 169972 - DNA, 15 bp, Homo sapiens
aaaattccattacag

SEQ ID NO: 169973 - DNA, 15 bp, Homo sapiens
aaattccattacagg

SEQ ID NO: 169974 - DNA, 15 bp, Homo sapiens
aattccattacaggg

SEQ ID NO: 169975 - DNA, 15 bp, Homo sapiens
attccattacagggg

SEQ ID NO: 169976 - DNA, 15 bp, Homo sapiens
ttccattacaggggc

SEQ ID NO: 169977 - DNA, 15 bp, Homo sapiens
tccattacaggggca

SEQ ID NO: 169978 - DNA, 15 bp, Homo sapiens
ccattacaggggcag

SEQ ID NO: 169979 - DNA, 15 bp, Homo sapiens
cattacaggggcagt

SEQ ID NO: 169980 - DNA, 15 bp, Homo sapiens
attacaggggcagtg

SEQ ID NO: 169981 - DNA, 15 bp, Homo sapiens
ttacaggggcagtgc

SEQ ID NO: 169982 - DNA, 15 bp, Homo sapiens
tacaggggcagtgcc

SEQ ID NO: 169983 - DNA, 15 bp, Homo sapiens
acaggggcagtgcct

SEQ ID NO: 169984 - DNA, 15 bp, Homo sapiens
caggggcagtgcctt

SEQ ID NO: 169985 - DNA, 15 bp, Homo sapiens
aggggcagtgccttt

SEQ ID NO: 169986 - DNA, 15 bp, Homo sapiens
ggggcagtgcctttg

SEQ ID NO: 169987 - DNA, 15 bp, Homo sapiens
gggcagtgcctttgt

SEQ ID NO: 169988 - DNA, 15 bp, Homo sapiens
ggcagtgcctttgta

SEQ ID NO: 169989 - DNA, 15 bp, Homo sapiens
gcagtgcctttgtag

SEQ ID NO: 169990 - DNA, 15 bp, Homo sapiens
cagtgcctttgtagc

SEQ ID NO: 169991 - DNA, 15 bp, Homo sapiens
agtgcctttgtagcc

SEQ ID NO: 169992 - DNA, 15 bp, Homo sapiens
gtgcctttgtagcct

SEQ ID NO: 169993 - DNA, 15 bp, Homo sapiens
tgcctttgtagccta

SEQ ID NO: 169994 - DNA, 15 bp, Homo sapiens
gcctttgtagcctat

SEQ ID NO: 169995 - DNA, 15 bp, Homo sapiens
cctttgtagcctatg

SEQ ID NO: 169996 - DNA, 15 bp, Homo sapiens
ctttgtagcctatgt

SEQ ID NO: 169997 - DNA, 15 bp, Homo sapiens
tttgtagcctatgtc

SEQ ID NO: 169998 - DNA, 15 bp, Homo sapiens
ttgtagcctatgtct

SEQ ID NO: 169999 - DNA, 15 bp, Homo sapiens
tgtagcctatgtctt

SEQ ID NO: 170000 - DNA, 15 bp, Homo sapiens
gtagcctatgtcttg

SEQ ID NO: 170001 - DNA, 15 bp, Homo sapiens
tagcctatgtcttgt

SEQ ID NO: 170002 - DNA, 15 bp, Homo sapiens
agcctatgtcttgta

SEQ ID NO: 170003 - DNA, 15 bp, Homo sapiens
gcctatgtcttgtat

SEQ ID NO: 170004 - DNA, 15 bp, Homo sapiens
cctatgtcttgtatg

SEQ ID NO: 170005 - DNA, 15 bp, Homo sapiens
ctatgtcttgtatgg

SEQ ID NO: 170006 - DNA, 15 bp, Homo sapiens
tatgtcttgtatggc

SEQ ID NO: 170007 - DNA, 15 bp, Homo sapiens
atgtcttgtatggct

SEQ ID NO: 170008 - DNA, 15 bp, Homo sapiens
tgtcttgtatggctc

SEQ ID NO: 170009 - DNA, 15 bp, Homo sapiens
gtcttgtatggctct

SEQ ID NO: 170010 - DNA, 15 bp, Homo sapiens
tcttgtatggctctc

SEQ ID NO: 170011 - DNA, 15 bp, Homo sapiens
cttgtatggctctca

SEQ ID NO: 170012 - DNA, 15 bp, Homo sapiens
ttgtatggctctcaa

SEQ ID NO: 170013 - DNA, 15 bp, Homo sapiens
tgtatggctctcaag

SEQ ID NO: 170014 - DNA, 15 bp, Homo sapiens
gtatggctctcaagt

SEQ ID NO: 170015 - DNA, 15 bp, Homo sapiens
tatggctctcaagtg

SEQ ID NO: 170016 - DNA, 15 bp, Homo sapiens
atggctctcaagtga

SEQ ID NO: 170017 - DNA, 15 bp, Homo sapiens
tggctctcaagtgaa

SEQ ID NO: 170018 - DNA, 15 bp, Homo sapiens
ggctctcaagtgaaa

SEQ ID NO: 170019 - DNA, 15 bp, Homo sapiens
gctctcaagtgaaag

SEQ ID NO: 170020 - DNA, 15 bp, Homo sapiens
ctctcaagtgaaaga

SEQ ID NO: 170021 - DNA, 15 bp, Homo sapiens
tctcaagtgaaagac

SEQ ID NO: 170022 - DNA, 15 bp, Homo sapiens
ctcaagtgaaagact

SEQ ID NO: 170023 - DNA, 15 bp, Homo sapiens
tcaagtgaaagactt

SEQ ID NO: 170024 - DNA, 15 bp, Homo sapiens
caagtgaaagacttg

SEQ ID NO: 170025 - DNA, 15 bp, Homo sapiens
aagtgaaagacttga

SEQ ID NO: 170026 - DNA, 15 bp, Homo sapiens
agtgaaagacttgaa

SEQ ID NO: 170027 - DNA, 15 bp, Homo sapiens
gtgaaagacttgaat

SEQ ID NO: 170028 - DNA, 15 bp, Homo sapiens
tgaaagacttgaatt

SEQ ID NO: 170029 - DNA, 15 bp, Homo sapiens
gaaagacttgaattt

SEQ ID NO: 170030 - DNA, 15 bp, Homo sapiens
aaagacttgaattta

SEQ ID NO: 170031 - DNA, 15 bp, Homo sapiens
aagacttgaatttag

SEQ ID NO: 170032 - DNA, 15 bp, Homo sapiens
agacttgaatttagt

SEQ ID NO: 170033 - DNA, 15 bp, Homo sapiens
gacttgaatttagtt

SEQ ID NO: 170034 - DNA, 15 bp, Homo sapiens
acttgaatttagttt

SEQ ID NO: 170035 - DNA, 15 bp, Homo sapiens
cttgaatttagtttt

SEQ ID NO: 170036 - DNA, 15 bp, Homo sapiens
ttgaatttagttttt

SEQ ID NO: 170037 - DNA, 15 bp, Homo sapiens
tgaatttagtttttt

SEQ ID NO: 170038 - DNA, 15 bp, Homo sapiens
gaatttagtttttta

SEQ ID NO: 170039 - DNA, 15 bp, Homo sapiens
aatttagttttttac

SEQ ID NO: 170040 - DNA, 15 bp, Homo sapiens
atttagttttttacc

SEQ ID NO: 170041 - DNA, 15 bp, Homo sapiens
tttagttttttacct

SEQ ID NO: 170042 - DNA, 15 bp, Homo sapiens
ttagttttttaccta

SEQ ID NO: 170043 - DNA, 15 bp, Homo sapiens
tagttttttacctat

SEQ ID NO: 170044 - DNA, 15 bp, Homo sapiens
agttttttacctata

SEQ ID NO: 170045 - DNA, 15 bp, Homo sapiens
gttttttacctatac

SEQ ID NO: 170046 - DNA, 15 bp, Homo sapiens
ttttttacctatacc

SEQ ID NO: 170047 - DNA, 15 bp, Homo sapiens
tttttacctatacct

SEQ ID NO: 170048 - DNA, 15 bp, Homo sapiens
ttttacctataccta

SEQ ID NO: 170049 - DNA, 15 bp, Homo sapiens
tttacctatacctat

SEQ ID NO: 170050 - DNA, 15 bp, Homo sapiens
ttacctatacctatg

SEQ ID NO: 170051 - DNA, 15 bp, Homo sapiens
tacctatacctatgt

SEQ ID NO: 170052 - DNA, 15 bp, Homo sapiens
acctatacctatgtg

SEQ ID NO: 170053 - DNA, 15 bp, Homo sapiens
cctatacctatgtga

SEQ ID NO: 170054 - DNA, 15 bp, Homo sapiens
ctatacctatgtgaa

SEQ ID NO: 170055 - DNA, 15 bp, Homo sapiens
tatacctatgtgaaa

SEQ ID NO: 170056 - DNA, 15 bp, Homo sapiens
atacctatgtgaaac

SEQ ID NO: 170057 - DNA, 15 bp, Homo sapiens
tacctatgtgaaact

SEQ ID NO: 170058 - DNA, 15 bp, Homo sapiens
acctatgtgaaactc

SEQ ID NO: 170059 - DNA, 15 bp, Homo sapiens
cctatgtgaaactct

SEQ ID NO: 170060 - DNA, 15 bp, Homo sapiens
ctatgtgaaactcta

SEQ ID NO: 170061 - DNA, 15 bp, Homo sapiens
tatgtgaaactctat

SEQ ID NO: 170062 - DNA, 15 bp, Homo sapiens
atgtgaaactctatt

SEQ ID NO: 170063 - DNA, 15 bp, Homo sapiens
tgtgaaactctatta

SEQ ID NO: 170064 - DNA, 15 bp, Homo sapiens
gtgaaactctattat

SEQ ID NO: 170065 - DNA, 15 bp, Homo sapiens
tgaaactctattatg

SEQ ID NO: 170066 - DNA, 15 bp, Homo sapiens
gaaactctattatgg

SEQ ID NO: 170067 - DNA, 15 bp, Homo sapiens
aaactctattatgga

SEQ ID NO: 170068 - DNA, 15 bp, Homo sapiens
aactctattatggaa

SEQ ID NO: 170069 - DNA, 15 bp, Homo sapiens
actctattatggaac

SEQ ID NO: 170070 - DNA, 15 bp, Homo sapiens
ctctattatggaacc

SEQ ID NO: 170071 - DNA, 15 bp, Homo sapiens
tctattatggaaccc

SEQ ID NO: 170072 - DNA, 15 bp, Homo sapiens
ctattatggaaccca

SEQ ID NO: 170073 - DNA, 15 bp, Homo sapiens
tattatggaacccaa

SEQ ID NO: 170074 - DNA, 15 bp, Homo sapiens
attatggaacccaat

SEQ ID NO: 170075 - DNA, 15 bp, Homo sapiens
ttatggaacccaatg

SEQ ID NO: 170076 - DNA, 15 bp, Homo sapiens
tatggaacccaatgg

SEQ ID NO: 170077 - DNA, 15 bp, Homo sapiens
atggaacccaatgga

SEQ ID NO: 170078 - DNA, 15 bp, Homo sapiens
tggaacccaatggac

SEQ ID NO: 170079 - DNA, 15 bp, Homo sapiens
ggaacccaatggaca

SEQ ID NO: 170080 - DNA, 15 bp, Homo sapiens
gaacccaatggacat

SEQ ID NO: 170081 - DNA, 15 bp, Homo sapiens
aacccaatggacata

SEQ ID NO: 170082 - DNA, 15 bp, Homo sapiens
acccaatggacatat

SEQ ID NO: 170083 - DNA, 15 bp, Homo sapiens
cccaatggacatatg

SEQ ID NO: 170084 - DNA, 15 bp, Homo sapiens
ccaatggacatatgg

SEQ ID NO: 170085 - DNA, 15 bp, Homo sapiens
caatggacatatggg

SEQ ID NO: 170086 - DNA, 15 bp, Homo sapiens
aatggacatatgggt

SEQ ID NO: 170087 - DNA, 15 bp, Homo sapiens
atggacatatgggtt

SEQ ID NO: 170088 - DNA, 15 bp, Homo sapiens
tggacatatgggttt

SEQ ID NO: 170089 - DNA, 15 bp, Homo sapiens
ggacatatgggtttg

SEQ ID NO: 170090 - DNA, 15 bp, Homo sapiens
gacatatgggtttga

SEQ ID NO: 170091 - DNA, 15 bp, Homo sapiens
acatatgggtttgaa

SEQ ID NO: 170092 - DNA, 15 bp, Homo sapiens
catatgggtttgaac

SEQ ID NO: 170093 - DNA, 15 bp, Homo sapiens
atatgggtttgaact

SEQ ID NO: 170094 - DNA, 15 bp, Homo sapiens
tatgggtttgaactc

SEQ ID NO: 170095 - DNA, 15 bp, Homo sapiens
atgggtttgaactca

SEQ ID NO: 170096 - DNA, 15 bp, Homo sapiens
tgggtttgaactcac

SEQ ID NO: 170097 - DNA, 15 bp, Homo sapiens
gggtttgaactcaca

SEQ ID NO: 170098 - DNA, 15 bp, Homo sapiens
ggtttgaactcacac

SEQ ID NO: 170099 - DNA, 15 bp, Homo sapiens
gtttgaactcacact

SEQ ID NO: 170100 - DNA, 15 bp, Homo sapiens
tttgaactcacactt

SEQ ID NO: 170101 - DNA, 15 bp, Homo sapiens
ttgaactcacacttt

SEQ ID NO: 170102 - DNA, 15 bp, Homo sapiens
tgaactcacactttt

SEQ ID NO: 170103 - DNA, 15 bp, Homo sapiens
gaactcacacttttt

SEQ ID NO: 170104 - DNA, 15 bp, Homo sapiens
aactcacactttttt

SEQ ID NO: 170105 - DNA, 15 bp, Homo sapiens
actcacacttttttt

SEQ ID NO: 170106 - DNA, 15 bp, Homo sapiens
ctcacactttttttt

SEQ ID NO: 170107 - DNA, 15 bp, Homo sapiens
tcacacttttttttt

SEQ ID NO: 170108 - DNA, 15 bp, Homo sapiens
cacactttttttttt

SEQ ID NO: 170109 - DNA, 15 bp, Homo sapiens
acacttttttttttt

SEQ ID NO: 170110 - DNA, 15 bp, Homo sapiens
tttttttttttgttc

SEQ ID NO: 170111 - DNA, 15 bp, Homo sapiens
ttttttttttgttcc

SEQ ID NO: 170112 - DNA, 15 bp, Homo sapiens
tttttttttgttcct

SEQ ID NO: 170113 - DNA, 15 bp, Homo sapiens
ttttttttgttcctg

SEQ ID NO: 170114 - DNA, 15 bp, Homo sapiens
tttttttgttcctgt

SEQ ID NO: 170115 - DNA, 15 bp, Homo sapiens
ttttttgttcctgtg

SEQ ID NO: 170116 - DNA, 15 bp, Homo sapiens
tttttgttcctgtgt

SEQ ID NO: 170117 - DNA, 15 bp, Homo sapiens
ttttgttcctgtgta

SEQ ID NO: 170118 - DNA, 15 bp, Homo sapiens
tttgttcctgtgtat

SEQ ID NO: 170119 - DNA, 15 bp, Homo sapiens
ttgttcctgtgtatt

SEQ ID NO: 170120 - DNA, 15 bp, Homo sapiens
tgttcctgtgtattc

SEQ ID NO: 170121 - DNA, 15 bp, Homo sapiens
gttcctgtgtattct

SEQ ID NO: 170122 - DNA, 15 bp, Homo sapiens
ttcctgtgtattctc

SEQ ID NO: 170123 - DNA, 15 bp, Homo sapiens
tcctgtgtattctca

SEQ ID NO: 170124 - DNA, 15 bp, Homo sapiens
cctgtgtattctcat

SEQ ID NO: 170125 - DNA, 15 bp, Homo sapiens
ctgtgtattctcatt

SEQ ID NO: 170126 - DNA, 15 bp, Homo sapiens
tgtgtattctcattg

SEQ ID NO: 170127 - DNA, 15 bp, Homo sapiens
gtgtattctcattgg

SEQ ID NO: 170128 - DNA, 15 bp, Homo sapiens
tgtattctcattggg

SEQ ID NO: 170129 - DNA, 15 bp, Homo sapiens
gtattctcattgggg

SEQ ID NO: 170130 - DNA, 15 bp, Homo sapiens
tattctcattggggt

SEQ ID NO: 170131 - DNA, 15 bp, Homo sapiens
attctcattggggtt

SEQ ID NO: 170132 - DNA, 15 bp, Homo sapiens
ttctcattggggttg

SEQ ID NO: 170133 - DNA, 15 bp, Homo sapiens
tctcattggggttgc

SEQ ID NO: 170134 - DNA, 15 bp, Homo sapiens
ctcattggggttgca

SEQ ID NO: 170135 - DNA, 15 bp, Homo sapiens
tcattggggttgcaa

SEQ ID NO: 170136 - DNA, 15 bp, Homo sapiens
cattggggttgcaac

SEQ ID NO: 170137 - DNA, 15 bp, Homo sapiens
attggggttgcaaca

SEQ ID NO: 170138 - DNA, 15 bp, Homo sapiens
ttggggttgcaacaa

SEQ ID NO: 170139 - DNA, 15 bp, Homo sapiens
tggggttgcaacaat

SEQ ID NO: 170140 - DNA, 15 bp, Homo sapiens
ggggttgcaacaata

SEQ ID NO: 170141 - DNA, 15 bp, Homo sapiens
gggttgcaacaataa

SEQ ID NO: 170142 - DNA, 15 bp, Homo sapiens
ggttgcaacaataat

SEQ ID NO: 170143 - DNA, 15 bp, Homo sapiens
gttgcaacaataatt

SEQ ID NO: 170144 - DNA, 15 bp, Homo sapiens
ttgcaacaataattc

SEQ ID NO: 170145 - DNA, 15 bp, Homo sapiens
tgcaacaataattca

SEQ ID NO: 170146 - DNA, 15 bp, Homo sapiens
gcaacaataattcat

SEQ ID NO: 170147 - DNA, 15 bp, Homo sapiens
caacaataattcatc

SEQ ID NO: 170148 - DNA, 15 bp, Homo sapiens
aacaataattcatca

SEQ ID NO: 170149 - DNA, 15 bp, Homo sapiens
acaataattcatcaa

SEQ ID NO: 170150 - DNA, 15 bp, Homo sapiens
caataattcatcaag

SEQ ID NO: 170151 - DNA, 15 bp, Homo sapiens
aataattcatcaagt

SEQ ID NO: 170152 - DNA, 15 bp, Homo sapiens
ataattcatcaagta

SEQ ID NO: 170153 - DNA, 15 bp, Homo sapiens
taattcatcaagtaa

SEQ ID NO: 170154 - DNA, 15 bp, Homo sapiens
aattcatcaagtaat

SEQ ID NO: 170155 - DNA, 15 bp, Homo sapiens
attcatcaagtaatc

SEQ ID NO: 170156 - DNA, 15 bp, Homo sapiens
ttcatcaagtaatca

SEQ ID NO: 170157 - DNA, 15 bp, Homo sapiens
tcatcaagtaatcat

SEQ ID NO: 170158 - DNA, 15 bp, Homo sapiens
catcaagtaatcatg

SEQ ID NO: 170159 - DNA, 15 bp, Homo sapiens
atcaagtaatcatgg

SEQ ID NO: 170160 - DNA, 15 bp, Homo sapiens
tcaagtaatcatggc

SEQ ID NO: 170161 - DNA, 15 bp, Homo sapiens
caagtaatcatggcc

SEQ ID NO: 170162 - DNA, 15 bp, Homo sapiens
aagtaatcatggcca

SEQ ID NO: 170163 - DNA, 15 bp, Homo sapiens
agtaatcatggccag

SEQ ID NO: 170164 - DNA, 15 bp, Homo sapiens
gtaatcatggccagc

SEQ ID NO: 170165 - DNA, 15 bp, Homo sapiens
taatcatggccagcg

SEQ ID NO: 170166 - DNA, 15 bp, Homo sapiens
aatcatggccagcga

SEQ ID NO: 170167 - DNA, 15 bp, Homo sapiens
atcatggccagcgat

SEQ ID NO: 170168 - DNA, 15 bp, Homo sapiens
tcatggccagcgatt

SEQ ID NO: 170169 - DNA, 15 bp, Homo sapiens
catggccagcgatta

SEQ ID NO: 170170 - DNA, 15 bp, Homo sapiens
atggccagcgattat

SEQ ID NO: 170171 - DNA, 15 bp, Homo sapiens
tggccagcgattatt

SEQ ID NO: 170172 - DNA, 15 bp, Homo sapiens
ggccagcgattattg

SEQ ID NO: 170173 - DNA, 15 bp, Homo sapiens
gccagcgattattga

SEQ ID NO: 170174 - DNA, 15 bp, Homo sapiens
ccagcgattattgat

SEQ ID NO: 170175 - DNA, 15 bp, Homo sapiens
cagcgattattgatc

SEQ ID NO: 170176 - DNA, 15 bp, Homo sapiens
agcgattattgatca

SEQ ID NO: 170177 - DNA, 15 bp, Homo sapiens
gcgattattgatcaa

SEQ ID NO: 170178 - DNA, 15 bp, Homo sapiens
cgattattgatcaaa

SEQ ID NO: 170179 - DNA, 15 bp, Homo sapiens
gattattgatcaaaa

SEQ ID NO: 170180 - DNA, 15 bp, Homo sapiens
attattgatcaaaat

SEQ ID NO: 170181 - DNA, 15 bp, Homo sapiens
ttattgatcaaaatc

SEQ ID NO: 170182 - DNA, 15 bp, Homo sapiens
tattgatcaaaatca

SEQ ID NO: 170183 - DNA, 15 bp, Homo sapiens
attgatcaaaatcaa

SEQ ID NO: 170184 - DNA, 15 bp, Homo sapiens
ttgatcaaaatcaaa

SEQ ID NO: 170185 - DNA, 15 bp, Homo sapiens
tgatcaaaatcaaaa

SEQ ID NO: 170186 - DNA, 15 bp, Homo sapiens
gatcaaaatcaaaag

SEQ ID NO: 170187 - DNA, 15 bp, Homo sapiens
atcaaaatcaaaagg

SEQ ID NO: 170188 - DNA, 15 bp, Homo sapiens
tcaaaatcaaaaggt

SEQ ID NO: 170189 - DNA, 15 bp, Homo sapiens
caaaatcaaaaggta

SEQ ID NO: 170190 - DNA, 15 bp, Homo sapiens
aaaatcaaaaggtaa

SEQ ID NO: 170191 - DNA, 15 bp, Homo sapiens
aaatcaaaaggtaat

SEQ ID NO: 170192 - DNA, 15 bp, Homo sapiens
aatcaaaaggtaatg

SEQ ID NO: 170193 - DNA, 15 bp, Homo sapiens
atcaaaaggtaatgc

SEQ ID NO: 170194 - DNA, 15 bp, Homo sapiens
tcaaaaggtaatgca

SEQ ID NO: 170195 - DNA, 15 bp, Homo sapiens
caaaaggtaatgcac

SEQ ID NO: 170196 - DNA, 15 bp, Homo sapiens
aaaaggtaatgcaca

SEQ ID NO: 170197 - DNA, 15 bp, Homo sapiens
aaaggtaatgcacat

SEQ ID NO: 170198 - DNA, 15 bp, Homo sapiens
aaggtaatgcacatc

SEQ ID NO: 170199 - DNA, 15 bp, Homo sapiens
aggtaatgcacatcc

SEQ ID NO: 170200 - DNA, 15 bp, Homo sapiens
ggtaatgcacatcct

SEQ ID NO: 170201 - DNA, 15 bp, Homo sapiens
gtaatgcacatcctc

SEQ ID NO: 170202 - DNA, 15 bp, Homo sapiens
taatgcacatcctca

SEQ ID NO: 170203 - DNA, 15 bp, Homo sapiens
aatgcacatcctcat

SEQ ID NO: 170204 - DNA, 15 bp, Homo sapiens
atgcacatcctcatt

SEQ ID NO: 170205 - DNA, 15 bp, Homo sapiens
tgcacatcctcattc

SEQ ID NO: 170206 - DNA, 15 bp, Homo sapiens
gcacatcctcattca

SEQ ID NO: 170207 - DNA, 15 bp, Homo sapiens
cacatcctcattcac

SEQ ID NO: 170208 - DNA, 15 bp, Homo sapiens
acatcctcattcact

SEQ ID NO: 170209 - DNA, 15 bp, Homo sapiens
catcctcattcacta

SEQ ID NO: 170210 - DNA, 15 bp, Homo sapiens
atcctcattcactaa

SEQ ID NO: 170211 - DNA, 15 bp, Homo sapiens
tcctcattcactaag

SEQ ID NO: 170212 - DNA, 15 bp, Homo sapiens
cctcattcactaagc

SEQ ID NO: 170213 - DNA, 15 bp, Homo sapiens
ctcattcactaagcc

SEQ ID NO: 170214 - DNA, 15 bp, Homo sapiens
tcattcactaagcca

SEQ ID NO: 170215 - DNA, 15 bp, Homo sapiens
cattcactaagccat

SEQ ID NO: 170216 - DNA, 15 bp, Homo sapiens
attcactaagccatg

SEQ ID NO: 170217 - DNA, 15 bp, Homo sapiens
ttcactaagccatgc

SEQ ID NO: 170218 - DNA, 15 bp, Homo sapiens
tcactaagccatgcc

SEQ ID NO: 170219 - DNA, 15 bp, Homo sapiens
cactaagccatgcca

SEQ ID NO: 170220 - DNA, 15 bp, Homo sapiens
actaagccatgccat

SEQ ID NO: 170221 - DNA, 15 bp, Homo sapiens
ctaagccatgccatg

SEQ ID NO: 170222 - DNA, 15 bp, Homo sapiens
taagccatgccatgc

SEQ ID NO: 170223 - DNA, 15 bp, Homo sapiens
aagccatgccatgcc

SEQ ID NO: 170224 - DNA, 15 bp, Homo sapiens
agccatgccatgccc

SEQ ID NO: 170225 - DNA, 15 bp, Homo sapiens
gccatgccatgccca

SEQ ID NO: 170226 - DNA, 15 bp, Homo sapiens
ccatgccatgcccag

SEQ ID NO: 170227 - DNA, 15 bp, Homo sapiens
catgccatgcccagg

SEQ ID NO: 170228 - DNA, 15 bp, Homo sapiens
atgccatgcccagga

SEQ ID NO: 170229 - DNA, 15 bp, Homo sapiens
tgccatgcccaggag

SEQ ID NO: 170230 - DNA, 15 bp, Homo sapiens
gccatgcccaggaga

SEQ ID NO: 170231 - DNA, 15 bp, Homo sapiens
ccatgcccaggagac

SEQ ID NO: 170232 - DNA, 15 bp, Homo sapiens
catgcccaggagact

SEQ ID NO: 170233 - DNA, 15 bp, Homo sapiens
atgcccaggagactg

SEQ ID NO: 170234 - DNA, 15 bp, Homo sapiens
tgcccaggagactgg

SEQ ID NO: 170235 - DNA, 15 bp, Homo sapiens
gcccaggagactggt

SEQ ID NO: 170236 - DNA, 15 bp, Homo sapiens
cccaggagactggtt

SEQ ID NO: 170237 - DNA, 15 bp, Homo sapiens
ccaggagactggttt

SEQ ID NO: 170238 - DNA, 15 bp, Homo sapiens
caggagactggtttc

SEQ ID NO: 170239 - DNA, 15 bp, Homo sapiens
aggagactggtttcc

SEQ ID NO: 170240 - DNA, 15 bp, Homo sapiens
ggagactggtttccc

SEQ ID NO: 170241 - DNA, 15 bp, Homo sapiens
gagactggtttcccg

SEQ ID NO: 170242 - DNA, 15 bp, Homo sapiens
agactggtttcccgg

SEQ ID NO: 170243 - DNA, 15 bp, Homo sapiens
gactggtttcccggt

SEQ ID NO: 170244 - DNA, 15 bp, Homo sapiens
actggtttcccggtg

SEQ ID NO: 170245 - DNA, 15 bp, Homo sapiens
ctggtttcccggtga

SEQ ID NO: 170246 - DNA, 15 bp, Homo sapiens
tggtttcccggtgac

SEQ ID NO: 170247 - DNA, 15 bp, Homo sapiens
ggtttcccggtgaca

SEQ ID NO: 170248 - DNA, 15 bp, Homo sapiens
gtttcccggtgacac

SEQ ID NO: 170249 - DNA, 15 bp, Homo sapiens
tttcccggtgacaca

SEQ ID NO: 170250 - DNA, 15 bp, Homo sapiens
ttcccggtgacacat

SEQ ID NO: 170251 - DNA, 15 bp, Homo sapiens
tcccggtgacacatc

SEQ ID NO: 170252 - DNA, 15 bp, Homo sapiens
cccggtgacacatcc

SEQ ID NO: 170253 - DNA, 15 bp, Homo sapiens
ccggtgacacatcca

SEQ ID NO: 170254 - DNA, 15 bp, Homo sapiens
cggtgacacatccat

SEQ ID NO: 170255 - DNA, 15 bp, Homo sapiens
ggtgacacatccatt

SEQ ID NO: 170256 - DNA, 15 bp, Homo sapiens
gtgacacatccattg

SEQ ID NO: 170257 - DNA, 15 bp, Homo sapiens
tgacacatccattgc

SEQ ID NO: 170258 - DNA, 15 bp, Homo sapiens
gacacatccattgct

SEQ ID NO: 170259 - DNA, 15 bp, Homo sapiens
acacatccattgctg

SEQ ID NO: 170260 - DNA, 15 bp, Homo sapiens
cacatccattgctgg

SEQ ID NO: 170261 - DNA, 15 bp, Homo sapiens
acatccattgctggc

SEQ ID NO: 170262 - DNA, 15 bp, Homo sapiens
catccattgctggca

SEQ ID NO: 170263 - DNA, 15 bp, Homo sapiens
atccattgctggcaa

SEQ ID NO: 170264 - DNA, 15 bp, Homo sapiens
tccattgctggcaat

SEQ ID NO: 170265 - DNA, 15 bp, Homo sapiens
ccattgctggcaatg

SEQ ID NO: 170266 - DNA, 15 bp, Homo sapiens
cattgctggcaatga

SEQ ID NO: 170267 - DNA, 15 bp, Homo sapiens
attgctggcaatgag

SEQ ID NO: 170268 - DNA, 15 bp, Homo sapiens
ttgctggcaatgagt

SEQ ID NO: 170269 - DNA, 15 bp, Homo sapiens
tgctggcaatgagtg

SEQ ID NO: 170270 - DNA, 15 bp, Homo sapiens
gctggcaatgagtgt

SEQ ID NO: 170271 - DNA, 15 bp, Homo sapiens
ctggcaatgagtgtg

SEQ ID NO: 170272 - DNA, 15 bp, Homo sapiens
tggcaatgagtgtgc

SEQ ID NO: 170273 - DNA, 15 bp, Homo sapiens
ggcaatgagtgtgcc

SEQ ID NO: 170274 - DNA, 15 bp, Homo sapiens
gcaatgagtgtgcca

SEQ ID NO: 170275 - DNA, 15 bp, Homo sapiens
caatgagtgtgccag

SEQ ID NO: 170276 - DNA, 15 bp, Homo sapiens
aatgagtgtgccaga

SEQ ID NO: 170277 - DNA, 15 bp, Homo sapiens
atgagtgtgccagag

SEQ ID NO: 170278 - DNA, 15 bp, Homo sapiens
tgagtgtgccagagt

SEQ ID NO: 170279 - DNA, 15 bp, Homo sapiens
gagtgtgccagagtt

SEQ ID NO: 170280 - DNA, 15 bp, Homo sapiens
agtgtgccagagtta

SEQ ID NO: 170281 - DNA, 15 bp, Homo sapiens
gtgtgccagagttat

SEQ ID NO: 170282 - DNA, 15 bp, Homo sapiens
tgtgccagagttatt

SEQ ID NO: 170283 - DNA, 15 bp, Homo sapiens
gtgccagagttatta

SEQ ID NO: 170284 - DNA, 15 bp, Homo sapiens
tgccagagttattag

SEQ ID NO: 170285 - DNA, 15 bp, Homo sapiens
gccagagttattagt

SEQ ID NO: 170286 - DNA, 15 bp, Homo sapiens
ccagagttattagtg

SEQ ID NO: 170287 - DNA, 15 bp, Homo sapiens
cagagttattagtgc

SEQ ID NO: 170288 - DNA, 15 bp, Homo sapiens
agagttattagtgcc

SEQ ID NO: 170289 - DNA, 15 bp, Homo sapiens
gagttattagtgcca

SEQ ID NO: 170290 - DNA, 15 bp, Homo sapiens
agttattagtgccaa

SEQ ID NO: 170291 - DNA, 15 bp, Homo sapiens
gttattagtgccaag

SEQ ID NO: 170292 - DNA, 15 bp, Homo sapiens
ttattagtgccaagt

SEQ ID NO: 170293 - DNA, 15 bp, Homo sapiens
tattagtgccaagtt

SEQ ID NO: 170294 - DNA, 15 bp, Homo sapiens
attagtgccaagttt

SEQ ID NO: 170295 - DNA, 15 bp, Homo sapiens
ttagtgccaagtttt

SEQ ID NO: 170296 - DNA, 15 bp, Homo sapiens
tagtgccaagttttt

SEQ ID NO: 170297 - DNA, 15 bp, Homo sapiens
agtgccaagtttttc

SEQ ID NO: 170298 - DNA, 15 bp, Homo sapiens
gtgccaagtttttca

SEQ ID NO: 170299 - DNA, 15 bp, Homo sapiens
tgccaagtttttcag

SEQ ID NO: 170300 - DNA, 15 bp, Homo sapiens
gccaagtttttcaga

SEQ ID NO: 170301 - DNA, 15 bp, Homo sapiens
ccaagtttttcagaa

SEQ ID NO: 170302 - DNA, 15 bp, Homo sapiens
caagtttttcagaaa

SEQ ID NO: 170303 - DNA, 15 bp, Homo sapiens
aagtttttcagaaag

SEQ ID NO: 170304 - DNA, 15 bp, Homo sapiens
agtttttcagaaagt

SEQ ID NO: 170305 - DNA, 15 bp, Homo sapiens
gtttttcagaaagtt

SEQ ID NO: 170306 - DNA, 15 bp, Homo sapiens
tttttcagaaagttt

SEQ ID NO: 170307 - DNA, 15 bp, Homo sapiens
ttttcagaaagtttg

SEQ ID NO: 170308 - DNA, 15 bp, Homo sapiens
tttcagaaagtttga

SEQ ID NO: 170309 - DNA, 15 bp, Homo sapiens
ttcagaaagtttgaa

SEQ ID NO: 170310 - DNA, 15 bp, Homo sapiens
tcagaaagtttgaag

SEQ ID NO: 170311 - DNA, 15 bp, Homo sapiens
cagaaagtttgaagc

SEQ ID NO: 170312 - DNA, 15 bp, Homo sapiens
agaaagtttgaagca

SEQ ID NO: 170313 - DNA, 15 bp, Homo sapiens
gaaagtttgaagcac

SEQ ID NO: 170314 - DNA, 15 bp, Homo sapiens
aaagtttgaagcacc

SEQ ID NO: 170315 - DNA, 15 bp, Homo sapiens
aagtttgaagcacca

SEQ ID NO: 170316 - DNA, 15 bp, Homo sapiens
agtttgaagcaccat

SEQ ID NO: 170317 - DNA, 15 bp, Homo sapiens
gtttgaagcaccatg

SEQ ID NO: 170318 - DNA, 15 bp, Homo sapiens
tttgaagcaccatgg

SEQ ID NO: 170319 - DNA, 15 bp, Homo sapiens
ttgaagcaccatggt

SEQ ID NO: 170320 - DNA, 15 bp, Homo sapiens
tgaagcaccatggtg

SEQ ID NO: 170321 - DNA, 15 bp, Homo sapiens
gaagcaccatggtgt

SEQ ID NO: 170322 - DNA, 15 bp, Homo sapiens
aagcaccatggtgtg

SEQ ID NO: 170323 - DNA, 15 bp, Homo sapiens
agcaccatggtgtgt

SEQ ID NO: 170324 - DNA, 15 bp, Homo sapiens
gcaccatggtgtgtc

SEQ ID NO: 170325 - DNA, 15 bp, Homo sapiens
caccatggtgtgtca

SEQ ID NO: 170326 - DNA, 15 bp, Homo sapiens
accatggtgtgtcat

SEQ ID NO: 170327 - DNA, 15 bp, Homo sapiens
ccatggtgtgtcatg

SEQ ID NO: 170328 - DNA, 15 bp, Homo sapiens
catggtgtgtcatgc

SEQ ID NO: 170329 - DNA, 15 bp, Homo sapiens
atggtgtgtcatgct

SEQ ID NO: 170330 - DNA, 15 bp, Homo sapiens
tggtgtgtcatgctc

SEQ ID NO: 170331 - DNA, 15 bp, Homo sapiens
ggtgtgtcatgctca

SEQ ID NO: 170332 - DNA, 15 bp, Homo sapiens
gtgtgtcatgctcac

SEQ ID NO: 170333 - DNA, 15 bp, Homo sapiens
tgtgtcatgctcact

SEQ ID NO: 170334 - DNA, 15 bp, Homo sapiens
gtgtcatgctcactt

SEQ ID NO: 170335 - DNA, 15 bp, Homo sapiens
tgtcatgctcacttt

SEQ ID NO: 170336 - DNA, 15 bp, Homo sapiens
gtcatgctcactttt

SEQ ID NO: 170337 - DNA, 15 bp, Homo sapiens
tcatgctcacttttg

SEQ ID NO: 170338 - DNA, 15 bp, Homo sapiens
catgctcacttttgt

SEQ ID NO: 170339 - DNA, 15 bp, Homo sapiens
atgctcacttttgtg

SEQ ID NO: 170340 - DNA, 15 bp, Homo sapiens
tgctcacttttgtga

SEQ ID NO: 170341 - DNA, 15 bp, Homo sapiens
gctcacttttgtgaa

SEQ ID NO: 170342 - DNA, 15 bp, Homo sapiens
ctcacttttgtgaaa

SEQ ID NO: 170343 - DNA, 15 bp, Homo sapiens
tcacttttgtgaaag

SEQ ID NO: 170344 - DNA, 15 bp, Homo sapiens
cacttttgtgaaagc

SEQ ID NO: 170345 - DNA, 15 bp, Homo sapiens
acttttgtgaaagct

SEQ ID NO: 170346 - DNA, 15 bp, Homo sapiens
cttttgtgaaagctg

SEQ ID NO: 170347 - DNA, 15 bp, Homo sapiens
ttttgtgaaagctgc

SEQ ID NO: 170348 - DNA, 15 bp, Homo sapiens
tttgtgaaagctgct

SEQ ID NO: 170349 - DNA, 15 bp, Homo sapiens
ttgtgaaagctgctc

SEQ ID NO: 170350 - DNA, 15 bp, Homo sapiens
tgtgaaagctgctct

SEQ ID NO: 170351 - DNA, 15 bp, Homo sapiens
gtgaaagctgctctg

SEQ ID NO: 170352 - DNA, 15 bp, Homo sapiens
tgaaagctgctctgc

SEQ ID NO: 170353 - DNA, 15 bp, Homo sapiens
gaaagctgctctgct

SEQ ID NO: 170354 - DNA, 15 bp, Homo sapiens
aaagctgctctgctc

SEQ ID NO: 170355 - DNA, 15 bp, Homo sapiens
aagctgctctgctca

SEQ ID NO: 170356 - DNA, 15 bp, Homo sapiens
agctgctctgctcag

SEQ ID NO: 170357 - DNA, 15 bp, Homo sapiens
gctgctctgctcaga

SEQ ID NO: 170358 - DNA, 15 bp, Homo sapiens
ctgctctgctcagag

SEQ ID NO: 170359 - DNA, 15 bp, Homo sapiens
tgctctgctcagagt

SEQ ID NO: 170360 - DNA, 15 bp, Homo sapiens
gctctgctcagagtc

SEQ ID NO: 170361 - DNA, 15 bp, Homo sapiens
ctctgctcagagtct

SEQ ID NO: 170362 - DNA, 15 bp, Homo sapiens
tctgctcagagtcta

SEQ ID NO: 170363 - DNA, 15 bp, Homo sapiens
ctgctcagagtctat

SEQ ID NO: 170364 - DNA, 15 bp, Homo sapiens
tgctcagagtctatc

SEQ ID NO: 170365 - DNA, 15 bp, Homo sapiens
gctcagagtctatca

SEQ ID NO: 170366 - DNA, 15 bp, Homo sapiens
ctcagagtctatcaa

SEQ ID NO: 170367 - DNA, 15 bp, Homo sapiens
tcagagtctatcaac

SEQ ID NO: 170368 - DNA, 15 bp, Homo sapiens
cagagtctatcaaca

SEQ ID NO: 170369 - DNA, 15 bp, Homo sapiens
agagtctatcaacat

SEQ ID NO: 170370 - DNA, 15 bp, Homo sapiens
gagtctatcaacatt

SEQ ID NO: 170371 - DNA, 15 bp, Homo sapiens
agtctatcaacattg

SEQ ID NO: 170372 - DNA, 15 bp, Homo sapiens
gtctatcaacattga

SEQ ID NO: 170373 - DNA, 15 bp, Homo sapiens
tctatcaacattgaa

SEQ ID NO: 170374 - DNA, 15 bp, Homo sapiens
ctatcaacattgaat

SEQ ID NO: 170375 - DNA, 15 bp, Homo sapiens
tatcaacattgaata

SEQ ID NO: 170376 - DNA, 15 bp, Homo sapiens
atcaacattgaatat

SEQ ID NO: 170377 - DNA, 15 bp, Homo sapiens
tcaacattgaatatc

SEQ ID NO: 170378 - DNA, 15 bp, Homo sapiens
caacattgaatatca

SEQ ID NO: 170379 - DNA, 15 bp, Homo sapiens
aacattgaatatcag

SEQ ID NO: 170380 - DNA, 15 bp, Homo sapiens
acattgaatatcagt

SEQ ID NO: 170381 - DNA, 15 bp, Homo sapiens
cattgaatatcagtt

SEQ ID NO: 170382 - DNA, 15 bp, Homo sapiens
attgaatatcagttg

SEQ ID NO: 170383 - DNA, 15 bp, Homo sapiens
ttgaatatcagttga

SEQ ID NO: 170384 - DNA, 15 bp, Homo sapiens
tgaatatcagttgac

SEQ ID NO: 170385 - DNA, 15 bp, Homo sapiens
gaatatcagttgaca

SEQ ID NO: 170386 - DNA, 15 bp, Homo sapiens
aatatcagttgacag

SEQ ID NO: 170387 - DNA, 15 bp, Homo sapiens
atatcagttgacaga

SEQ ID NO: 170388 - DNA, 15 bp, Homo sapiens
tatcagttgacagaa

SEQ ID NO: 170389 - DNA, 15 bp, Homo sapiens
atcagttgacagaat

SEQ ID NO: 170390 - DNA, 15 bp, Homo sapiens
tcagttgacagaatg

SEQ ID NO: 170391 - DNA, 15 bp, Homo sapiens
cagttgacagaatgg

SEQ ID NO: 170392 - DNA, 15 bp, Homo sapiens
agttgacagaatggt

SEQ ID NO: 170393 - DNA, 15 bp, Homo sapiens
gttgacagaatggtg

SEQ ID NO: 170394 - DNA, 15 bp, Homo sapiens
ttgacagaatggtgc

SEQ ID NO: 170395 - DNA, 15 bp, Homo sapiens
tgacagaatggtgcc

SEQ ID NO: 170396 - DNA, 15 bp, Homo sapiens
gacagaatggtgcca

SEQ ID NO: 170397 - DNA, 15 bp, Homo sapiens
acagaatggtgccat

SEQ ID NO: 170398 - DNA, 15 bp, Homo sapiens
cagaatggtgccatg

SEQ ID NO: 170399 - DNA, 15 bp, Homo sapiens
agaatggtgccatgc

SEQ ID NO: 170400 - DNA, 15 bp, Homo sapiens
gaatggtgccatgcg

SEQ ID NO: 170401 - DNA, 15 bp, Homo sapiens
aatggtgccatgcgt

SEQ ID NO: 170402 - DNA, 15 bp, Homo sapiens
atggtgccatgcgtg

SEQ ID NO: 170403 - DNA, 15 bp, Homo sapiens
tggtgccatgcgtgg

SEQ ID NO: 170404 - DNA, 15 bp, Homo sapiens
ggtgccatgcgtggc

SEQ ID NO: 170405 - DNA, 15 bp, Homo sapiens
gtgccatgcgtggct

SEQ ID NO: 170406 - DNA, 15 bp, Homo sapiens
tgccatgcgtggcta

SEQ ID NO: 170407 - DNA, 15 bp, Homo sapiens
gccatgcgtggctaa

SEQ ID NO: 170408 - DNA, 15 bp, Homo sapiens
ccatgcgtggctaac

SEQ ID NO: 170409 - DNA, 15 bp, Homo sapiens
catgcgtggctaaca

SEQ ID NO: 170410 - DNA, 15 bp, Homo sapiens
atgcgtggctaacat

SEQ ID NO: 170411 - DNA, 15 bp, Homo sapiens
tgcgtggctaacatc

SEQ ID NO: 170412 - DNA, 15 bp, Homo sapiens
gcgtggctaacatcc

SEQ ID NO: 170413 - DNA, 15 bp, Homo sapiens
cgtggctaacatcct

SEQ ID NO: 170414 - DNA, 15 bp, Homo sapiens
gtggctaacatcctg

SEQ ID NO: 170415 - DNA, 15 bp, Homo sapiens
tggctaacatcctgc

SEQ ID NO: 170416 - DNA, 15 bp, Homo sapiens
ggctaacatcctgct

SEQ ID NO: 170417 - DNA, 15 bp, Homo sapiens
gctaacatcctgctt

SEQ ID NO: 170418 - DNA, 15 bp, Homo sapiens
ctaacatcctgcttt

SEQ ID NO: 170419 - DNA, 15 bp, Homo sapiens
taacatcctgctttg

SEQ ID NO: 170420 - DNA, 15 bp, Homo sapiens
aacatcctgctttga

SEQ ID NO: 170421 - DNA, 15 bp, Homo sapiens
acatcctgctttgat

SEQ ID NO: 170422 - DNA, 15 bp, Homo sapiens
catcctgctttgatt

SEQ ID NO: 170423 - DNA, 15 bp, Homo sapiens
atcctgctttgattc

SEQ ID NO: 170424 - DNA, 15 bp, Homo sapiens
tcctgctttgattcc

SEQ ID NO: 170425 - DNA, 15 bp, Homo sapiens
cctgctttgattccc

SEQ ID NO: 170426 - DNA, 15 bp, Homo sapiens
ctgctttgattccct

SEQ ID NO: 170427 - DNA, 15 bp, Homo sapiens
tgctttgattccctc

SEQ ID NO: 170428 - DNA, 15 bp, Homo sapiens
gctttgattccctct

SEQ ID NO: 170429 - DNA, 15 bp, Homo sapiens
ctttgattccctctg

SEQ ID NO: 170430 - DNA, 15 bp, Homo sapiens
tttgattccctctga

SEQ ID NO: 170431 - DNA, 15 bp, Homo sapiens
ttgattccctctgat

SEQ ID NO: 170432 - DNA, 15 bp, Homo sapiens
tgattccctctgata

SEQ ID NO: 170433 - DNA, 15 bp, Homo sapiens
gattccctctgataa

SEQ ID NO: 170434 - DNA, 15 bp, Homo sapiens
attccctctgataag

SEQ ID NO: 170435 - DNA, 15 bp, Homo sapiens
ttccctctgataagc

SEQ ID NO: 170436 - DNA, 15 bp, Homo sapiens
tccctctgataagct

SEQ ID NO: 170437 - DNA, 15 bp, Homo sapiens
ccctctgataagctg

SEQ ID NO: 170438 - DNA, 15 bp, Homo sapiens
cctctgataagctgt

SEQ ID NO: 170439 - DNA, 15 bp, Homo sapiens
ctctgataagctgtt

SEQ ID NO: 170440 - DNA, 15 bp, Homo sapiens
tctgataagctgttc

SEQ ID NO: 170441 - DNA, 15 bp, Homo sapiens
ctgataagctgttct

SEQ ID NO: 170442 - DNA, 15 bp, Homo sapiens
tgataagctgttctg

SEQ ID NO: 170443 - DNA, 15 bp, Homo sapiens
gataagctgttctgg

SEQ ID NO: 170444 - DNA, 15 bp, Homo sapiens
ataagctgttctggt

SEQ ID NO: 170445 - DNA, 15 bp, Homo sapiens
taagctgttctggtg

SEQ ID NO: 170446 - DNA, 15 bp, Homo sapiens
aagctgttctggtgg

SEQ ID NO: 170447 - DNA, 15 bp, Homo sapiens
agctgttctggtggc

SEQ ID NO: 170448 - DNA, 15 bp, Homo sapiens
gctgttctggtggca

SEQ ID NO: 170449 - DNA, 15 bp, Homo sapiens
ctgttctggtggcag

SEQ ID NO: 170450 - DNA, 15 bp, Homo sapiens
tgttctggtggcagt

SEQ ID NO: 170451 - DNA, 15 bp, Homo sapiens
gttctggtggcagta

SEQ ID NO: 170452 - DNA, 15 bp, Homo sapiens
ttctggtggcagtaa

SEQ ID NO: 170453 - DNA, 15 bp, Homo sapiens
tctggtggcagtaac

SEQ ID NO: 170454 - DNA, 15 bp, Homo sapiens
ctggtggcagtaaca

SEQ ID NO: 170455 - DNA, 15 bp, Homo sapiens
tggtggcagtaacat

SEQ ID NO: 170456 - DNA, 15 bp, Homo sapiens
ggtggcagtaacatg

SEQ ID NO: 170457 - DNA, 15 bp, Homo sapiens
gtggcagtaacatgc

SEQ ID NO: 170458 - DNA, 15 bp, Homo sapiens
tggcagtaacatgca

SEQ ID NO: 170459 - DNA, 15 bp, Homo sapiens
ggcagtaacatgcaa

SEQ ID NO: 170460 - DNA, 15 bp, Homo sapiens
gcagtaacatgcaac

SEQ ID NO: 170461 - DNA, 15 bp, Homo sapiens
cagtaacatgcaaca

SEQ ID NO: 170462 - DNA, 15 bp, Homo sapiens
agtaacatgcaacaa

SEQ ID NO: 170463 - DNA, 15 bp, Homo sapiens
gtaacatgcaacaaa

SEQ ID NO: 170464 - DNA, 15 bp, Homo sapiens
taacatgcaacaaaa

SEQ ID NO: 170465 - DNA, 15 bp, Homo sapiens
aacatgcaacaaaaa

SEQ ID NO: 170466 - DNA, 15 bp, Homo sapiens
acatgcaacaaaaat

SEQ ID NO: 170467 - DNA, 15 bp, Homo sapiens
catgcaacaaaaatg

SEQ ID NO: 170468 - DNA, 15 bp, Homo sapiens
atgcaacaaaaatgt

SEQ ID NO: 170469 - DNA, 15 bp, Homo sapiens
tgcaacaaaaatgtg

SEQ ID NO: 170470 - DNA, 15 bp, Homo sapiens
gcaacaaaaatgtgg

SEQ ID NO: 170471 - DNA, 15 bp, Homo sapiens
caacaaaaatgtggg

SEQ ID NO: 170472 - DNA, 15 bp, Homo sapiens
aacaaaaatgtgggt

SEQ ID NO: 170473 - DNA, 15 bp, Homo sapiens
acaaaaatgtgggtg

SEQ ID NO: 170474 - DNA, 15 bp, Homo sapiens
caaaaatgtgggtgt

SEQ ID NO: 170475 - DNA, 15 bp, Homo sapiens
aaaaatgtgggtgtc

SEQ ID NO: 170476 - DNA, 15 bp, Homo sapiens
aaaatgtgggtgtct

SEQ ID NO: 170477 - DNA, 15 bp, Homo sapiens
aaatgtgggtgtctc

SEQ ID NO: 170478 - DNA, 15 bp, Homo sapiens
aatgtgggtgtctcc

SEQ ID NO: 170479 - DNA, 15 bp, Homo sapiens
atgtgggtgtctcca

SEQ ID NO: 170480 - DNA, 15 bp, Homo sapiens
tgtgggtgtctccag

SEQ ID NO: 170481 - DNA, 15 bp, Homo sapiens
gtgggtgtctccagg

SEQ ID NO: 170482 - DNA, 15 bp, Homo sapiens
tgggtgtctccaggc

SEQ ID NO: 170483 - DNA, 15 bp, Homo sapiens
gggtgtctccaggca

SEQ ID NO: 170484 - DNA, 15 bp, Homo sapiens
ggtgtctccaggcac

SEQ ID NO: 170485 - DNA, 15 bp, Homo sapiens
gtgtctccaggcacg

SEQ ID NO: 170486 - DNA, 15 bp, Homo sapiens
tgtctccaggcacgg

SEQ ID NO: 170487 - DNA, 15 bp, Homo sapiens
gtctccaggcacggg

SEQ ID NO: 170488 - DNA, 15 bp, Homo sapiens
tctccaggcacggga

SEQ ID NO: 170489 - DNA, 15 bp, Homo sapiens
ctccaggcacgggaa

SEQ ID NO: 170490 - DNA, 15 bp, Homo sapiens
tccaggcacgggaaa

SEQ ID NO: 170491 - DNA, 15 bp, Homo sapiens
ccaggcacgggaaac

SEQ ID NO: 170492 - DNA, 15 bp, Homo sapiens
caggcacgggaaact

SEQ ID NO: 170493 - DNA, 15 bp, Homo sapiens
aggcacgggaaactt

SEQ ID NO: 170494 - DNA, 15 bp, Homo sapiens
ggcacgggaaacttg

SEQ ID NO: 170495 - DNA, 15 bp, Homo sapiens
gcacgggaaacttgg

SEQ ID NO: 170496 - DNA, 15 bp, Homo sapiens
cacgggaaacttggt

SEQ ID NO: 170497 - DNA, 15 bp, Homo sapiens
acgggaaacttggtt

SEQ ID NO: 170498 - DNA, 15 bp, Homo sapiens
cgggaaacttggttc

SEQ ID NO: 170499 - DNA, 15 bp, Homo sapiens
gggaaacttggttcc

SEQ ID NO: 170500 - DNA, 15 bp, Homo sapiens
ggaaacttggttcca

SEQ ID NO: 170501 - DNA, 15 bp, Homo sapiens
gaaacttggttccat

SEQ ID NO: 170502 - DNA, 15 bp, Homo sapiens
aaacttggttccatt

SEQ ID NO: 170503 - DNA, 15 bp, Homo sapiens
aacttggttccattg

SEQ ID NO: 170504 - DNA, 15 bp, Homo sapiens
acttggttccattgt

SEQ ID NO: 170505 - DNA, 15 bp, Homo sapiens
cttggttccattgtt

SEQ ID NO: 170506 - DNA, 15 bp, Homo sapiens
ttggttccattgtta

SEQ ID NO: 170507 - DNA, 15 bp, Homo sapiens
tggttccattgttat

SEQ ID NO: 170508 - DNA, 15 bp, Homo sapiens
ggttccattgttata

SEQ ID NO: 170509 - DNA, 15 bp, Homo sapiens
gttccattgttatat

SEQ ID NO: 170510 - DNA, 15 bp, Homo sapiens
ttccattgttatatt

SEQ ID NO: 170511 - DNA, 15 bp, Homo sapiens
tccattgttatattg

SEQ ID NO: 170512 - DNA, 15 bp, Homo sapiens
ccattgttatattgt

SEQ ID NO: 170513 - DNA, 15 bp, Homo sapiens
cattgttatattgtc

SEQ ID NO: 170514 - DNA, 15 bp, Homo sapiens
attgttatattgtcc

SEQ ID NO: 170515 - DNA, 15 bp, Homo sapiens
ttgttatattgtcct

SEQ ID NO: 170516 - DNA, 15 bp, Homo sapiens
tgttatattgtccta

SEQ ID NO: 170517 - DNA, 15 bp, Homo sapiens
gttatattgtcctat

SEQ ID NO: 170518 - DNA, 15 bp, Homo sapiens
ttatattgtcctatg

SEQ ID NO: 170519 - DNA, 15 bp, Homo sapiens
tatattgtcctatgc

SEQ ID NO: 170520 - DNA, 15 bp, Homo sapiens
atattgtcctatgct

SEQ ID NO: 170521 - DNA, 15 bp, Homo sapiens
tattgtcctatgctt

SEQ ID NO: 170522 - DNA, 15 bp, Homo sapiens
attgtcctatgcttc

SEQ ID NO: 170523 - DNA, 15 bp, Homo sapiens
ttgtcctatgcttcg

SEQ ID NO: 170524 - DNA, 15 bp, Homo sapiens
tgtcctatgcttcga

SEQ ID NO: 170525 - DNA, 15 bp, Homo sapiens
gtcctatgcttcgag

SEQ ID NO: 170526 - DNA, 15 bp, Homo sapiens
tcctatgcttcgagc

SEQ ID NO: 170527 - DNA, 15 bp, Homo sapiens
cctatgcttcgagcc

SEQ ID NO: 170528 - DNA, 15 bp, Homo sapiens
ctatgcttcgagcca

SEQ ID NO: 170529 - DNA, 15 bp, Homo sapiens
tatgcttcgagccat

SEQ ID NO: 170530 - DNA, 15 bp, Homo sapiens
atgcttcgagccatg

SEQ ID NO: 170531 - DNA, 15 bp, Homo sapiens
tgcttcgagccatgg

SEQ ID NO: 170532 - DNA, 15 bp, Homo sapiens
gcttcgagccatggg

SEQ ID NO: 170533 - DNA, 15 bp, Homo sapiens
cttcgagccatgggt

SEQ ID NO: 170534 - DNA, 15 bp, Homo sapiens
ttcgagccatgggtc

SEQ ID NO: 170535 - DNA, 15 bp, Homo sapiens
tcgagccatgggtct

SEQ ID NO: 170536 - DNA, 15 bp, Homo sapiens
cgagccatgggtcta

SEQ ID NO: 170537 - DNA, 15 bp, Homo sapiens
gagccatgggtctac

SEQ ID NO: 170538 - DNA, 15 bp, Homo sapiens
agccatgggtctaca

SEQ ID NO: 170539 - DNA, 15 bp, Homo sapiens
gccatgggtctacag

SEQ ID NO: 170540 - DNA, 15 bp, Homo sapiens
ccatgggtctacagg

SEQ ID NO: 170541 - DNA, 15 bp, Homo sapiens
catgggtctacaggg

SEQ ID NO: 170542 - DNA, 15 bp, Homo sapiens
atgggtctacagggt

SEQ ID NO: 170543 - DNA, 15 bp, Homo sapiens
tgggtctacagggtc

SEQ ID NO: 170544 - DNA, 15 bp, Homo sapiens
gggtctacagggtca

SEQ ID NO: 170545 - DNA, 15 bp, Homo sapiens
ggtctacagggtcat

SEQ ID NO: 170546 - DNA, 15 bp, Homo sapiens
gtctacagggtcatc

SEQ ID NO: 170547 - DNA, 15 bp, Homo sapiens
tctacagggtcatcc

SEQ ID NO: 170548 - DNA, 15 bp, Homo sapiens
ctacagggtcatcct

SEQ ID NO: 170549 - DNA, 15 bp, Homo sapiens
tacagggtcatcctt

SEQ ID NO: 170550 - DNA, 15 bp, Homo sapiens
acagggtcatcctta

SEQ ID NO: 170551 - DNA, 15 bp, Homo sapiens
cagggtcatccttat

SEQ ID NO: 170552 - DNA, 15 bp, Homo sapiens
agggtcatccttatg

SEQ ID NO: 170553 - DNA, 15 bp, Homo sapiens
gggtcatccttatga

SEQ ID NO: 170554 - DNA, 15 bp, Homo sapiens
ggtcatccttatgag

SEQ ID NO: 170555 - DNA, 15 bp, Homo sapiens
gtcatccttatgaga

SEQ ID NO: 170556 - DNA, 15 bp, Homo sapiens
tcatccttatgagac

SEQ ID NO: 170557 - DNA, 15 bp, Homo sapiens
catccttatgagact

SEQ ID NO: 170558 - DNA, 15 bp, Homo sapiens
atccttatgagactc

SEQ ID NO: 170559 - DNA, 15 bp, Homo sapiens
tccttatgagactct

SEQ ID NO: 170560 - DNA, 15 bp, Homo sapiens
ccttatgagactctt

SEQ ID NO: 170561 - DNA, 15 bp, Homo sapiens
cttatgagactctta

SEQ ID NO: 170562 - DNA, 15 bp, Homo sapiens
ttatgagactcttaa

SEQ ID NO: 170563 - DNA, 15 bp, Homo sapiens
tatgagactcttaaa

SEQ ID NO: 170564 - DNA, 15 bp, Homo sapiens
atgagactcttaaat

SEQ ID NO: 170565 - DNA, 15 bp, Homo sapiens
tgagactcttaaata

SEQ ID NO: 170566 - DNA, 15 bp, Homo sapiens
gagactcttaaatat

SEQ ID NO: 170567 - DNA, 15 bp, Homo sapiens
agactcttaaatata

SEQ ID NO: 170568 - DNA, 15 bp, Homo sapiens
gactcttaaatatac

SEQ ID NO: 170569 - DNA, 15 bp, Homo sapiens
actcttaaatatact

SEQ ID NO: 170570 - DNA, 15 bp, Homo sapiens
ctcttaaatatactt

SEQ ID NO: 170571 - DNA, 15 bp, Homo sapiens
tcttaaatatactta

SEQ ID NO: 170572 - DNA, 15 bp, Homo sapiens
cttaaatatacttag

SEQ ID NO: 170573 - DNA, 15 bp, Homo sapiens
ttaaatatacttaga

SEQ ID NO: 170574 - DNA, 15 bp, Homo sapiens
taaatatacttagat

SEQ ID NO: 170575 - DNA, 15 bp, Homo sapiens
aaatatacttagatc

SEQ ID NO: 170576 - DNA, 15 bp, Homo sapiens
aatatacttagatcc

SEQ ID NO: 170577 - DNA, 15 bp, Homo sapiens
atatacttagatcct

SEQ ID NO: 170578 - DNA, 15 bp, Homo sapiens
tatacttagatcctg

SEQ ID NO: 170579 - DNA, 15 bp, Homo sapiens
atacttagatcctgg

SEQ ID NO: 170580 - DNA, 15 bp, Homo sapiens
tacttagatcctggt

SEQ ID NO: 170581 - DNA, 15 bp, Homo sapiens
acttagatcctggta

SEQ ID NO: 170582 - DNA, 15 bp, Homo sapiens
cttagatcctggtaa

SEQ ID NO: 170583 - DNA, 15 bp, Homo sapiens
ttagatcctggtaag

SEQ ID NO: 170584 - DNA, 15 bp, Homo sapiens
tagatcctggtaaga

SEQ ID NO: 170585 - DNA, 15 bp, Homo sapiens
agatcctggtaagag

SEQ ID NO: 170586 - DNA, 15 bp, Homo sapiens
gatcctggtaagagg

SEQ ID NO: 170587 - DNA, 15 bp, Homo sapiens
atcctggtaagaggc

SEQ ID NO: 170588 - DNA, 15 bp, Homo sapiens
tcctggtaagaggca

SEQ ID NO: 170589 - DNA, 15 bp, Homo sapiens
cctggtaagaggcaa

SEQ ID NO: 170590 - DNA, 15 bp, Homo sapiens
ctggtaagaggcaaa

SEQ ID NO: 170591 - DNA, 15 bp, Homo sapiens
tggtaagaggcaaag

SEQ ID NO: 170592 - DNA, 15 bp, Homo sapiens
ggtaagaggcaaaga

SEQ ID NO: 170593 - DNA, 15 bp, Homo sapiens
gtaagaggcaaagaa

SEQ ID NO: 170594 - DNA, 15 bp, Homo sapiens
taagaggcaaagaat

SEQ ID NO: 170595 - DNA, 15 bp, Homo sapiens
aagaggcaaagaatc

SEQ ID NO: 170596 - DNA, 15 bp, Homo sapiens
agaggcaaagaatca

SEQ ID NO: 170597 - DNA, 15 bp, Homo sapiens
gaggcaaagaatcaa

SEQ ID NO: 170598 - DNA, 15 bp, Homo sapiens
aggcaaagaatcaac

SEQ ID NO: 170599 - DNA, 15 bp, Homo sapiens
ggcaaagaatcaaca

SEQ ID NO: 170600 - DNA, 15 bp, Homo sapiens
gcaaagaatcaacag

SEQ ID NO: 170601 - DNA, 15 bp, Homo sapiens
caaagaatcaacagc

SEQ ID NO: 170602 - DNA, 15 bp, Homo sapiens
aaagaatcaacagcc

SEQ ID NO: 170603 - DNA, 15 bp, Homo sapiens
aagaatcaacagcca

SEQ ID NO: 170604 - DNA, 15 bp, Homo sapiens
agaatcaacagccaa

SEQ ID NO: 170605 - DNA, 15 bp, Homo sapiens
gaatcaacagccaaa

SEQ ID NO: 170606 - DNA, 15 bp, Homo sapiens
aatcaacagccaaac

SEQ ID NO: 170607 - DNA, 15 bp, Homo sapiens
atcaacagccaaact

SEQ ID NO: 170608 - DNA, 15 bp, Homo sapiens
tcaacagccaaactg

SEQ ID NO: 170609 - DNA, 15 bp, Homo sapiens
caacagccaaactgc

SEQ ID NO: 170610 - DNA, 15 bp, Homo sapiens
aacagccaaactgct

SEQ ID NO: 170611 - DNA, 15 bp, Homo sapiens
acagccaaactgctg

SEQ ID NO: 170612 - DNA, 15 bp, Homo sapiens
cagccaaactgctgg

SEQ ID NO: 170613 - DNA, 15 bp, Homo sapiens
agccaaactgctggg

SEQ ID NO: 170614 - DNA, 15 bp, Homo sapiens
gccaaactgctgggg

SEQ ID NO: 170615 - DNA, 15 bp, Homo sapiens
ccaaactgctggggc

SEQ ID NO: 170616 - DNA, 15 bp, Homo sapiens
caaactgctggggct

SEQ ID NO: 170617 - DNA, 15 bp, Homo sapiens
aaactgctggggctg

SEQ ID NO: 170618 - DNA, 15 bp, Homo sapiens
aactgctggggctgc

SEQ ID NO: 170619 - DNA, 15 bp, Homo sapiens
actgctggggctgca

SEQ ID NO: 170620 - DNA, 15 bp, Homo sapiens
ctgctggggctgcaa

SEQ ID NO: 170621 - DNA, 15 bp, Homo sapiens
tgctggggctgcaag

SEQ ID NO: 170622 - DNA, 15 bp, Homo sapiens
gctggggctgcaagc

SEQ ID NO: 170623 - DNA, 15 bp, Homo sapiens
ctggggctgcaagct

SEQ ID NO: 170624 - DNA, 15 bp, Homo sapiens
tggggctgcaagctg

SEQ ID NO: 170625 - DNA, 15 bp, Homo sapiens
ggggctgcaagctgc

SEQ ID NO: 170626 - DNA, 15 bp, Homo sapiens
gggctgcaagctgct

SEQ ID NO: 170627 - DNA, 15 bp, Homo sapiens
ggctgcaagctgctg

SEQ ID NO: 170628 - DNA, 15 bp, Homo sapiens
gctgcaagctgctga

SEQ ID NO: 170629 - DNA, 15 bp, Homo sapiens
ctgcaagctgctgaa

SEQ ID NO: 170630 - DNA, 15 bp, Homo sapiens
tgcaagctgctgaag

SEQ ID NO: 170631 - DNA, 15 bp, Homo sapiens
gcaagctgctgaagc

SEQ ID NO: 170632 - DNA, 15 bp, Homo sapiens
caagctgctgaagcc

SEQ ID NO: 170633 - DNA, 15 bp, Homo sapiens
aagctgctgaagcca

SEQ ID NO: 170634 - DNA, 15 bp, Homo sapiens
agctgctgaagccag

SEQ ID NO: 170635 - DNA, 15 bp, Homo sapiens
gctgctgaagccagg

SEQ ID NO: 170636 - DNA, 15 bp, Homo sapiens
ctgctgaagccaggg

SEQ ID NO: 170637 - DNA, 15 bp, Homo sapiens
tgctgaagccagggc

SEQ ID NO: 170638 - DNA, 15 bp, Homo sapiens
gctgaagccagggca

SEQ ID NO: 170639 - DNA, 15 bp, Homo sapiens
ctgaagccagggcat

SEQ ID NO: 170640 - DNA, 15 bp, Homo sapiens
tgaagccagggcatg

SEQ ID NO: 170641 - DNA, 15 bp, Homo sapiens
gaagccagggcatgg

SEQ ID NO: 170642 - DNA, 15 bp, Homo sapiens
aagccagggcatggg

SEQ ID NO: 170643 - DNA, 15 bp, Homo sapiens
agccagggcatggga

SEQ ID NO: 170644 - DNA, 15 bp, Homo sapiens
gccagggcatgggat

SEQ ID NO: 170645 - DNA, 15 bp, Homo sapiens
ccagggcatgggatt

SEQ ID NO: 170646 - DNA, 15 bp, Homo sapiens
cagggcatgggatta

SEQ ID NO: 170647 - DNA, 15 bp, Homo sapiens
agggcatgggattaa

SEQ ID NO: 170648 - DNA, 15 bp, Homo sapiens
gggcatgggattaaa

SEQ ID NO: 170649 - DNA, 15 bp, Homo sapiens
ggcatgggattaaag

SEQ ID NO: 170650 - DNA, 15 bp, Homo sapiens
gcatgggattaaaga

SEQ ID NO: 170651 - DNA, 15 bp, Homo sapiens
catgggattaaagag

SEQ ID NO: 170652 - DNA, 15 bp, Homo sapiens
atgggattaaagaga

SEQ ID NO: 170653 - DNA, 15 bp, Homo sapiens
tgggattaaagagat

SEQ ID NO: 170654 - DNA, 15 bp, Homo sapiens
gggattaaagagatt

SEQ ID NO: 170655 - DNA, 15 bp, Homo sapiens
ggattaaagagattg

SEQ ID NO: 170656 - DNA, 15 bp, Homo sapiens
gattaaagagattgt

SEQ ID NO: 170657 - DNA, 15 bp, Homo sapiens
attaaagagattgtg

SEQ ID NO: 170658 - DNA, 15 bp, Homo sapiens
ttaaagagattgtgc

SEQ ID NO: 170659 - DNA, 15 bp, Homo sapiens
taaagagattgtgcg

SEQ ID NO: 170660 - DNA, 15 bp, Homo sapiens
aaagagattgtgcgt

SEQ ID NO: 170661 - DNA, 15 bp, Homo sapiens
aagagattgtgcgtt

SEQ ID NO: 170662 - DNA, 15 bp, Homo sapiens
agagattgtgcgttc

SEQ ID NO: 170663 - DNA, 15 bp, Homo sapiens
gagattgtgcgttca

SEQ ID NO: 170664 - DNA, 15 bp, Homo sapiens
agattgtgcgttcaa

SEQ ID NO: 170665 - DNA, 15 bp, Homo sapiens
gattgtgcgttcaaa

SEQ ID NO: 170666 - DNA, 15 bp, Homo sapiens
attgtgcgttcaaac

SEQ ID NO: 170667 - DNA, 15 bp, Homo sapiens
ttgtgcgttcaaacc

SEQ ID NO: 170668 - DNA, 15 bp, Homo sapiens
tgtgcgttcaaacct

SEQ ID NO: 170669 - DNA, 15 bp, Homo sapiens
gtgcgttcaaaccta

SEQ ID NO: 170670 - DNA, 15 bp, Homo sapiens
tgcgttcaaacctag

SEQ ID NO: 170671 - DNA, 15 bp, Homo sapiens
gcgttcaaacctagg

SEQ ID NO: 170672 - DNA, 15 bp, Homo sapiens
cgttcaaacctaggg

SEQ ID NO: 170673 - DNA, 15 bp, Homo sapiens
gttcaaacctaggga

SEQ ID NO: 170674 - DNA, 15 bp, Homo sapiens
ttcaaacctagggaa

SEQ ID NO: 170675 - DNA, 15 bp, Homo sapiens
tcaaacctagggaag

SEQ ID NO: 170676 - DNA, 15 bp, Homo sapiens
caaacctagggaagc

SEQ ID NO: 170677 - DNA, 15 bp, Homo sapiens
aaacctagggaagcc

SEQ ID NO: 170678 - DNA, 15 bp, Homo sapiens
aacctagggaagcct

SEQ ID NO: 170679 - DNA, 15 bp, Homo sapiens
acctagggaagcctg

SEQ ID NO: 170680 - DNA, 15 bp, Homo sapiens
cctagggaagcctgt

SEQ ID NO: 170681 - DNA, 15 bp, Homo sapiens
ctagggaagcctgtg

SEQ ID NO: 170682 - DNA, 15 bp, Homo sapiens
tagggaagcctgtgc

SEQ ID NO: 170683 - DNA, 15 bp, Homo sapiens
agggaagcctgtgcc

SEQ ID NO: 170684 - DNA, 15 bp, Homo sapiens
gggaagcctgtgccc

SEQ ID NO: 170685 - DNA, 15 bp, Homo sapiens
ggaagcctgtgccca

SEQ ID NO: 170686 - DNA, 15 bp, Homo sapiens
gaagcctgtgcccat

SEQ ID NO: 170687 - DNA, 15 bp, Homo sapiens
aagcctgtgcccatt

SEQ ID NO: 170688 - DNA, 15 bp, Homo sapiens
agcctgtgcccattt

SEQ ID NO: 170689 - DNA, 15 bp, Homo sapiens
gcctgtgcccatttg

SEQ ID NO: 170690 - DNA, 15 bp, Homo sapiens
cctgtgcccatttgt

SEQ ID NO: 170691 - DNA, 15 bp, Homo sapiens
ctgtgcccatttgtc

SEQ ID NO: 170692 - DNA, 15 bp, Homo sapiens
tgtgcccatttgtcc

SEQ ID NO: 170693 - DNA, 15 bp, Homo sapiens
gtgcccatttgtcct

SEQ ID NO: 170694 - DNA, 15 bp, Homo sapiens
tgcccatttgtcctg

SEQ ID NO: 170695 - DNA, 15 bp, Homo sapiens
gcccatttgtcctga

SEQ ID NO: 170696 - DNA, 15 bp, Homo sapiens
cccatttgtcctgac

SEQ ID NO: 170697 - DNA, 15 bp, Homo sapiens
ccatttgtcctgact

SEQ ID NO: 170698 - DNA, 15 bp, Homo sapiens
catttgtcctgactg

SEQ ID NO: 170699 - DNA, 15 bp, Homo sapiens
atttgtcctgactgt

SEQ ID NO: 170700 - DNA, 15 bp, Homo sapiens
tttgtcctgactgtc

SEQ ID NO: 170701 - DNA, 15 bp, Homo sapiens
ttgtcctgactgtct

SEQ ID NO: 170702 - DNA, 15 bp, Homo sapiens
tgtcctgactgtctg

SEQ ID NO: 170703 - DNA, 15 bp, Homo sapiens
gtcctgactgtctgc

SEQ ID NO: 170704 - DNA, 15 bp, Homo sapiens
tcctgactgtctgct

SEQ ID NO: 170705 - DNA, 15 bp, Homo sapiens
cctgactgtctgcta

SEQ ID NO: 170706 - DNA, 15 bp, Homo sapiens
ctgactgtctgctaa

SEQ ID NO: 170707 - DNA, 15 bp, Homo sapiens
tgactgtctgctaac

SEQ ID NO: 170708 - DNA, 15 bp, Homo sapiens
gactgtctgctaaca

SEQ ID NO: 170709 - DNA, 15 bp, Homo sapiens
actgtctgctaacat

SEQ ID NO: 170710 - DNA, 15 bp, Homo sapiens
ctgtctgctaacatg

SEQ ID NO: 170711 - DNA, 15 bp, Homo sapiens
tgtctgctaacatgg

SEQ ID NO: 170712 - DNA, 15 bp, Homo sapiens
gtctgctaacatggt

SEQ ID NO: 170713 - DNA, 15 bp, Homo sapiens
tctgctaacatggta

SEQ ID NO: 170714 - DNA, 15 bp, Homo sapiens
ctgctaacatggtac

SEQ ID NO: 170715 - DNA, 15 bp, Homo sapiens
tgctaacatggtaca

SEQ ID NO: 170716 - DNA, 15 bp, Homo sapiens
gctaacatggtacac

SEQ ID NO: 170717 - DNA, 15 bp, Homo sapiens
ctaacatggtacact

SEQ ID NO: 170718 - DNA, 15 bp, Homo sapiens
taacatggtacactg

SEQ ID NO: 170719 - DNA, 15 bp, Homo sapiens
aacatggtacactgc

SEQ ID NO: 170720 - DNA, 15 bp, Homo sapiens
acatggtacactgca

SEQ ID NO: 170721 - DNA, 15 bp, Homo sapiens
catggtacactgcat

SEQ ID NO: 170722 - DNA, 15 bp, Homo sapiens
atggtacactgcatc

SEQ ID NO: 170723 - DNA, 15 bp, Homo sapiens
tggtacactgcatct

SEQ ID NO: 170724 - DNA, 15 bp, Homo sapiens
ggtacactgcatctc

SEQ ID NO: 170725 - DNA, 15 bp, Homo sapiens
gtacactgcatctca

SEQ ID NO: 170726 - DNA, 15 bp, Homo sapiens
tacactgcatctcaa

SEQ ID NO: 170727 - DNA, 15 bp, Homo sapiens
acactgcatctcaag

SEQ ID NO: 170728 - DNA, 15 bp, Homo sapiens
cactgcatctcaaga

SEQ ID NO: 170729 - DNA, 15 bp, Homo sapiens
actgcatctcaagat

SEQ ID NO: 170730 - DNA, 15 bp, Homo sapiens
ctgcatctcaagatg

SEQ ID NO: 170731 - DNA, 15 bp, Homo sapiens
tgcatctcaagatgt

SEQ ID NO: 170732 - DNA, 15 bp, Homo sapiens
gcatctcaagatgtt

SEQ ID NO: 170733 - DNA, 15 bp, Homo sapiens
catctcaagatgttt

SEQ ID NO: 170734 - DNA, 15 bp, Homo sapiens
atctcaagatgttta

SEQ ID NO: 170735 - DNA, 15 bp, Homo sapiens
tctcaagatgtttat

SEQ ID NO: 170736 - DNA, 15 bp, Homo sapiens
ctcaagatgtttatc

SEQ ID NO: 170737 - DNA, 15 bp, Homo sapiens
tcaagatgtttatct

SEQ ID NO: 170738 - DNA, 15 bp, Homo sapiens
caagatgtttatctg

SEQ ID NO: 170739 - DNA, 15 bp, Homo sapiens
aagatgtttatctga

SEQ ID NO: 170740 - DNA, 15 bp, Homo sapiens
agatgtttatctgac

SEQ ID NO: 170741 - DNA, 15 bp, Homo sapiens
gatgtttatctgaca

SEQ ID NO: 170742 - DNA, 15 bp, Homo sapiens
atgtttatctgacac

SEQ ID NO: 170743 - DNA, 15 bp, Homo sapiens
tgtttatctgacaca

SEQ ID NO: 170744 - DNA, 15 bp, Homo sapiens
gtttatctgacacaa

SEQ ID NO: 170745 - DNA, 15 bp, Homo sapiens
tttatctgacacaag

SEQ ID NO: 170746 - DNA, 15 bp, Homo sapiens
ttatctgacacaagt

SEQ ID NO: 170747 - DNA, 15 bp, Homo sapiens
tatctgacacaagtg

SEQ ID NO: 170748 - DNA, 15 bp, Homo sapiens
atctgacacaagtgt

SEQ ID NO: 170749 - DNA, 15 bp, Homo sapiens
tctgacacaagtgta

SEQ ID NO: 170750 - DNA, 15 bp, Homo sapiens
ctgacacaagtgtat

SEQ ID NO: 170751 - DNA, 15 bp, Homo sapiens
tgacacaagtgtatt

SEQ ID NO: 170752 - DNA, 15 bp, Homo sapiens
gacacaagtgtatta

SEQ ID NO: 170753 - DNA, 15 bp, Homo sapiens
acacaagtgtattat

SEQ ID NO: 170754 - DNA, 15 bp, Homo sapiens
cacaagtgtattatt

SEQ ID NO: 170755 - DNA, 15 bp, Homo sapiens
acaagtgtattattt

SEQ ID NO: 170756 - DNA, 15 bp, Homo sapiens
caagtgtattatttc

SEQ ID NO: 170757 - DNA, 15 bp, Homo sapiens
aagtgtattatttct

SEQ ID NO: 170758 - DNA, 15 bp, Homo sapiens
agtgtattatttctg

SEQ ID NO: 170759 - DNA, 15 bp, Homo sapiens
gtgtattatttctgg

SEQ ID NO: 170760 - DNA, 15 bp, Homo sapiens
tgtattatttctggc

SEQ ID NO: 170761 - DNA, 15 bp, Homo sapiens
gtattatttctggct

SEQ ID NO: 170762 - DNA, 15 bp, Homo sapiens
tattatttctggctt

SEQ ID NO: 170763 - DNA, 15 bp, Homo sapiens
attatttctggcttt

SEQ ID NO: 170764 - DNA, 15 bp, Homo sapiens
ttatttctggctttt

SEQ ID NO: 170765 - DNA, 15 bp, Homo sapiens
tatttctggcttttt

SEQ ID NO: 170766 - DNA, 15 bp, Homo sapiens
atttctggctttttg

SEQ ID NO: 170767 - DNA, 15 bp, Homo sapiens
tttctggctttttga

SEQ ID NO: 170768 - DNA, 15 bp, Homo sapiens
ttctggctttttgaa

SEQ ID NO: 170769 - DNA, 15 bp, Homo sapiens
tctggctttttgaat

SEQ ID NO: 170770 - DNA, 15 bp, Homo sapiens
ctggctttttgaatt

SEQ ID NO: 170771 - DNA, 15 bp, Homo sapiens
tggctttttgaatta

SEQ ID NO: 170772 - DNA, 15 bp, Homo sapiens
ggctttttgaattaa

SEQ ID NO: 170773 - DNA, 15 bp, Homo sapiens
gctttttgaattaat

SEQ ID NO: 170774 - DNA, 15 bp, Homo sapiens
ctttttgaattaatc

SEQ ID NO: 170775 - DNA, 15 bp, Homo sapiens
tttttgaattaatct

SEQ ID NO: 170776 - DNA, 15 bp, Homo sapiens
ttttgaattaatcta

SEQ ID NO: 170777 - DNA, 15 bp, Homo sapiens
tttgaattaatctag

SEQ ID NO: 170778 - DNA, 15 bp, Homo sapiens
ttgaattaatctaga

SEQ ID NO: 170779 - DNA, 15 bp, Homo sapiens
tgaattaatctagaa

SEQ ID NO: 170780 - DNA, 15 bp, Homo sapiens
gaattaatctagaaa

SEQ ID NO: 170781 - DNA, 15 bp, Homo sapiens
aattaatctagaaaa

SEQ ID NO: 170782 - DNA, 15 bp, Homo sapiens
attaatctagaaaat

SEQ ID NO: 170783 - DNA, 15 bp, Homo sapiens
ttaatctagaaaatg

SEQ ID NO: 170784 - DNA, 15 bp, Homo sapiens
taatctagaaaatga

SEQ ID NO: 170785 - DNA, 15 bp, Homo sapiens
aatctagaaaatgaa

SEQ ID NO: 170786 - DNA, 15 bp, Homo sapiens
atctagaaaatgaaa

SEQ ID NO: 170787 - DNA, 15 bp, Homo sapiens
tctagaaaatgaaaa

SEQ ID NO: 170788 - DNA, 15 bp, Homo sapiens
ctagaaaatgaaaag

SEQ ID NO: 170789 - DNA, 15 bp, Homo sapiens
tagaaaatgaaaaga

SEQ ID NO: 170790 - DNA, 15 bp, Homo sapiens
agaaaatgaaaagat

SEQ ID NO: 170791 - DNA, 15 bp, Homo sapiens
gaaaatgaaaagatg

SEQ ID NO: 170792 - DNA, 15 bp, Homo sapiens
aaaatgaaaagatgg

SEQ ID NO: 170793 - DNA, 15 bp, Homo sapiens
aaatgaaaagatgga

SEQ ID NO: 170794 - DNA, 15 bp, Homo sapiens
aatgaaaagatggag

SEQ ID NO: 170795 - DNA, 15 bp, Homo sapiens
atgaaaagatggagt

SEQ ID NO: 170796 - DNA, 15 bp, Homo sapiens
tgaaaagatggagtt

SEQ ID NO: 170797 - DNA, 15 bp, Homo sapiens
gaaaagatggagttg

SEQ ID NO: 170798 - DNA, 15 bp, Homo sapiens
aaaagatggagttgt

SEQ ID NO: 170799 - DNA, 15 bp, Homo sapiens
aaagatggagttgta

SEQ ID NO: 170800 - DNA, 15 bp, Homo sapiens
aagatggagttgtat

SEQ ID NO: 170801 - DNA, 15 bp, Homo sapiens
agatggagttgtatt

SEQ ID NO: 170802 - DNA, 15 bp, Homo sapiens
gatggagttgtattt

SEQ ID NO: 170803 - DNA, 15 bp, Homo sapiens
atggagttgtatttt

SEQ ID NO: 170804 - DNA, 15 bp, Homo sapiens
tggagttgtattttg

SEQ ID NO: 170805 - DNA, 15 bp, Homo sapiens
ggagttgtattttga

SEQ ID NO: 170806 - DNA, 15 bp, Homo sapiens
gagttgtattttgac

SEQ ID NO: 170807 - DNA, 15 bp, Homo sapiens
agttgtattttgaca

SEQ ID NO: 170808 - DNA, 15 bp, Homo sapiens
gttgtattttgacaa

SEQ ID NO: 170809 - DNA, 15 bp, Homo sapiens
ttgtattttgacaaa

SEQ ID NO: 170810 - DNA, 15 bp, Homo sapiens
tgtattttgacaaaa

SEQ ID NO: 170811 - DNA, 15 bp, Homo sapiens
gtattttgacaaaaa

SEQ ID NO: 170812 - DNA, 15 bp, Homo sapiens
tattttgacaaaaat

SEQ ID NO: 170813 - DNA, 15 bp, Homo sapiens
attttgacaaaaatg

SEQ ID NO: 170814 - DNA, 15 bp, Homo sapiens
ttttgacaaaaatgt

SEQ ID NO: 170815 - DNA, 15 bp, Homo sapiens
tttgacaaaaatgtt

SEQ ID NO: 170816 - DNA, 15 bp, Homo sapiens
ttgacaaaaatgttt

SEQ ID NO: 170817 - DNA, 15 bp, Homo sapiens
tgacaaaaatgtttg

SEQ ID NO: 170818 - DNA, 15 bp, Homo sapiens
gacaaaaatgtttgt

SEQ ID NO: 170819 - DNA, 15 bp, Homo sapiens
acaaaaatgtttgta

SEQ ID NO: 170820 - DNA, 15 bp, Homo sapiens
caaaaatgtttgtac

SEQ ID NO: 170821 - DNA, 15 bp, Homo sapiens
aaaaatgtttgtact

SEQ ID NO: 170822 - DNA, 15 bp, Homo sapiens
aaaatgtttgtactt

SEQ ID NO: 170823 - DNA, 15 bp, Homo sapiens
aaatgtttgtacttt

SEQ ID NO: 170824 - DNA, 15 bp, Homo sapiens
aatgtttgtactttt

SEQ ID NO: 170825 - DNA, 15 bp, Homo sapiens
atgtttgtacttttt

SEQ ID NO: 170826 - DNA, 15 bp, Homo sapiens
tgtttgtacttttta

SEQ ID NO: 170827 - DNA, 15 bp, Homo sapiens
gtttgtactttttaa

SEQ ID NO: 170828 - DNA, 15 bp, Homo sapiens
tttgtactttttaat

SEQ ID NO: 170829 - DNA, 15 bp, Homo sapiens
ttgtactttttaatg

SEQ ID NO: 170830 - DNA, 15 bp, Homo sapiens
tgtactttttaatgt

SEQ ID NO: 170831 - DNA, 15 bp, Homo sapiens
gtactttttaatgtt

SEQ ID NO: 170832 - DNA, 15 bp, Homo sapiens
tactttttaatgtta

SEQ ID NO: 170833 - DNA, 15 bp, Homo sapiens
actttttaatgttat

SEQ ID NO: 170834 - DNA, 15 bp, Homo sapiens
ctttttaatgttatt

SEQ ID NO: 170835 - DNA, 15 bp, Homo sapiens
tttttaatgttattt

SEQ ID NO: 170836 - DNA, 15 bp, Homo sapiens
ttttaatgttatttg

SEQ ID NO: 170837 - DNA, 15 bp, Homo sapiens
tttaatgttatttgg

SEQ ID NO: 170838 - DNA, 15 bp, Homo sapiens
ttaatgttatttgga

SEQ ID NO: 170839 - DNA, 15 bp, Homo sapiens
taatgttatttggaa

SEQ ID NO: 170840 - DNA, 15 bp, Homo sapiens
aatgttatttggaat

SEQ ID NO: 170841 - DNA, 15 bp, Homo sapiens
atgttatttggaatt

SEQ ID NO: 170842 - DNA, 15 bp, Homo sapiens
tgttatttggaattt

SEQ ID NO: 170843 - DNA, 15 bp, Homo sapiens
gttatttggaatttt

SEQ ID NO: 170844 - DNA, 15 bp, Homo sapiens
ttatttggaatttta

SEQ ID NO: 170845 - DNA, 15 bp, Homo sapiens
tatttggaattttaa

SEQ ID NO: 170846 - DNA, 15 bp, Homo sapiens
atttggaattttaag

SEQ ID NO: 170847 - DNA, 15 bp, Homo sapiens
tttggaattttaagt

SEQ ID NO: 170848 - DNA, 15 bp, Homo sapiens
ttggaattttaagtt

SEQ ID NO: 170849 - DNA, 15 bp, Homo sapiens
tggaattttaagttc

SEQ ID NO: 170850 - DNA, 15 bp, Homo sapiens
ggaattttaagttct

SEQ ID NO: 170851 - DNA, 15 bp, Homo sapiens
gaattttaagttcta

SEQ ID NO: 170852 - DNA, 15 bp, Homo sapiens
aattttaagttctat

SEQ ID NO: 170853 - DNA, 15 bp, Homo sapiens
attttaagttctatc

SEQ ID NO: 170854 - DNA, 15 bp, Homo sapiens
ttttaagttctatca

SEQ ID NO: 170855 - DNA, 15 bp, Homo sapiens
tttaagttctatcag

SEQ ID NO: 170856 - DNA, 15 bp, Homo sapiens
ttaagttctatcagt

SEQ ID NO: 170857 - DNA, 15 bp, Homo sapiens
taagttctatcagtg

SEQ ID NO: 170858 - DNA, 15 bp, Homo sapiens
aagttctatcagtga

SEQ ID NO: 170859 - DNA, 15 bp, Homo sapiens
agttctatcagtgac

SEQ ID NO: 170860 - DNA, 15 bp, Homo sapiens
gttctatcagtgact

SEQ ID NO: 170861 - DNA, 15 bp, Homo sapiens
ttctatcagtgactt

SEQ ID NO: 170862 - DNA, 15 bp, Homo sapiens
tctatcagtgacttc

SEQ ID NO: 170863 - DNA, 15 bp, Homo sapiens
ctatcagtgacttct

SEQ ID NO: 170864 - DNA, 15 bp, Homo sapiens
tatcagtgacttctg

SEQ ID NO: 170865 - DNA, 15 bp, Homo sapiens
atcagtgacttctga

SEQ ID NO: 170866 - DNA, 15 bp, Homo sapiens
tcagtgacttctgaa

SEQ ID NO: 170867 - DNA, 15 bp, Homo sapiens
cagtgacttctgaat

SEQ ID NO: 170868 - DNA, 15 bp, Homo sapiens
agtgacttctgaatc

SEQ ID NO: 170869 - DNA, 15 bp, Homo sapiens
gtgacttctgaatcc

SEQ ID NO: 170870 - DNA, 15 bp, Homo sapiens
tgacttctgaatcct

SEQ ID NO: 170871 - DNA, 15 bp, Homo sapiens
gacttctgaatcctt

SEQ ID NO: 170872 - DNA, 15 bp, Homo sapiens
acttctgaatcctta

SEQ ID NO: 170873 - DNA, 15 bp, Homo sapiens
cttctgaatccttag

SEQ ID NO: 170874 - DNA, 15 bp, Homo sapiens
ttctgaatccttaga

SEQ ID NO: 170875 - DNA, 15 bp, Homo sapiens
tctgaatccttagaa

SEQ ID NO: 170876 - DNA, 15 bp, Homo sapiens
ctgaatccttagaat

SEQ ID NO: 170877 - DNA, 15 bp, Homo sapiens
tgaatccttagaatg

SEQ ID NO: 170878 - DNA, 15 bp, Homo sapiens
gaatccttagaatgg

SEQ ID NO: 170879 - DNA, 15 bp, Homo sapiens
aatccttagaatggc

SEQ ID NO: 170880 - DNA, 15 bp, Homo sapiens
atccttagaatggcc

SEQ ID NO: 170881 - DNA, 15 bp, Homo sapiens
tccttagaatggcct

SEQ ID NO: 170882 - DNA, 15 bp, Homo sapiens
ccttagaatggcctc

SEQ ID NO: 170883 - DNA, 15 bp, Homo sapiens
cttagaatggcctct

SEQ ID NO: 170884 - DNA, 15 bp, Homo sapiens
ttagaatggcctctt

SEQ ID NO: 170885 - DNA, 15 bp, Homo sapiens
tagaatggcctcttt

SEQ ID NO: 170886 - DNA, 15 bp, Homo sapiens
agaatggcctctttg

SEQ ID NO: 170887 - DNA, 15 bp, Homo sapiens
gaatggcctctttgt

SEQ ID NO: 170888 - DNA, 15 bp, Homo sapiens
aatggcctctttgta

SEQ ID NO: 170889 - DNA, 15 bp, Homo sapiens
atggcctctttgtag

SEQ ID NO: 170890 - DNA, 15 bp, Homo sapiens
tggcctctttgtaga

SEQ ID NO: 170891 - DNA, 15 bp, Homo sapiens
ggcctctttgtagaa

SEQ ID NO: 170892 - DNA, 15 bp, Homo sapiens
gcctctttgtagaac

SEQ ID NO: 170893 - DNA, 15 bp, Homo sapiens
cctctttgtagaacc

SEQ ID NO: 170894 - DNA, 15 bp, Homo sapiens
ctctttgtagaaccc

SEQ ID NO: 170895 - DNA, 15 bp, Homo sapiens
tctttgtagaaccct

SEQ ID NO: 170896 - DNA, 15 bp, Homo sapiens
ctttgtagaaccctg

SEQ ID NO: 170897 - DNA, 15 bp, Homo sapiens
tttgtagaaccctgt

SEQ ID NO: 170898 - DNA, 15 bp, Homo sapiens
ttgtagaaccctgtg

SEQ ID NO: 170899 - DNA, 15 bp, Homo sapiens
tgtagaaccctgtgg

SEQ ID NO: 170900 - DNA, 15 bp, Homo sapiens
gtagaaccctgtggt

SEQ ID NO: 170901 - DNA, 15 bp, Homo sapiens
tagaaccctgtggta

SEQ ID NO: 170902 - DNA, 15 bp, Homo sapiens
agaaccctgtggtat

SEQ ID NO: 170903 - DNA, 15 bp, Homo sapiens
gaaccctgtggtata

SEQ ID NO: 170904 - DNA, 15 bp, Homo sapiens
aaccctgtggtatag

SEQ ID NO: 170905 - DNA, 15 bp, Homo sapiens
accctgtggtataga

SEQ ID NO: 170906 - DNA, 15 bp, Homo sapiens
ccctgtggtatagag

SEQ ID NO: 170907 - DNA, 15 bp, Homo sapiens
cctgtggtatagagg

SEQ ID NO: 170908 - DNA, 15 bp, Homo sapiens
ctgtggtatagagga

SEQ ID NO: 170909 - DNA, 15 bp, Homo sapiens
tgtggtatagaggag

SEQ ID NO: 170910 - DNA, 15 bp, Homo sapiens
gtggtatagaggagt

SEQ ID NO: 170911 - DNA, 15 bp, Homo sapiens
tggtatagaggagta

SEQ ID NO: 170912 - DNA, 15 bp, Homo sapiens
ggtatagaggagtat

SEQ ID NO: 170913 - DNA, 15 bp, Homo sapiens
gtatagaggagtatg

SEQ ID NO: 170914 - DNA, 15 bp, Homo sapiens
tatagaggagtatgg

SEQ ID NO: 170915 - DNA, 15 bp, Homo sapiens
atagaggagtatggc

SEQ ID NO: 170916 - DNA, 15 bp, Homo sapiens
tagaggagtatggcc

SEQ ID NO: 170917 - DNA, 15 bp, Homo sapiens
agaggagtatggcca

SEQ ID NO: 170918 - DNA, 15 bp, Homo sapiens
gaggagtatggccac

SEQ ID NO: 170919 - DNA, 15 bp, Homo sapiens
aggagtatggccact

SEQ ID NO: 170920 - DNA, 15 bp, Homo sapiens
ggagtatggccactg

SEQ ID NO: 170921 - DNA, 15 bp, Homo sapiens
gagtatggccactgc

SEQ ID NO: 170922 - DNA, 15 bp, Homo sapiens
agtatggccactgcc

SEQ ID NO: 170923 - DNA, 15 bp, Homo sapiens
gtatggccactgccc

SEQ ID NO: 170924 - DNA, 15 bp, Homo sapiens
tatggccactgcccc

SEQ ID NO: 170925 - DNA, 15 bp, Homo sapiens
atggccactgcccca

SEQ ID NO: 170926 - DNA, 15 bp, Homo sapiens
tggccactgccccac

SEQ ID NO: 170927 - DNA, 15 bp, Homo sapiens
ggccactgccccact

SEQ ID NO: 170928 - DNA, 15 bp, Homo sapiens
gccactgccccacta

SEQ ID NO: 170929 - DNA, 15 bp, Homo sapiens
ccactgccccactat

SEQ ID NO: 170930 - DNA, 15 bp, Homo sapiens
cactgccccactatt

SEQ ID NO: 170931 - DNA, 15 bp, Homo sapiens
actgccccactattt

SEQ ID NO: 170932 - DNA, 15 bp, Homo sapiens
ctgccccactatttt

SEQ ID NO: 170933 - DNA, 15 bp, Homo sapiens
tgccccactattttt

SEQ ID NO: 170934 - DNA, 15 bp, Homo sapiens
gccccactattttta

SEQ ID NO: 170935 - DNA, 15 bp, Homo sapiens
ccccactatttttat

SEQ ID NO: 170936 - DNA, 15 bp, Homo sapiens
cccactatttttatt

SEQ ID NO: 170937 - DNA, 15 bp, Homo sapiens
ccactatttttattt

SEQ ID NO: 170938 - DNA, 15 bp, Homo sapiens
cactatttttatttt

SEQ ID NO: 170939 - DNA, 15 bp, Homo sapiens
actatttttattttc

SEQ ID NO: 170940 - DNA, 15 bp, Homo sapiens
ctatttttattttct

SEQ ID NO: 170941 - DNA, 15 bp, Homo sapiens
tatttttattttctt

SEQ ID NO: 170942 - DNA, 15 bp, Homo sapiens
atttttattttctta

SEQ ID NO: 170943 - DNA, 15 bp, Homo sapiens
tttttattttcttat

SEQ ID NO: 170944 - DNA, 15 bp, Homo sapiens
ttttattttcttatg

SEQ ID NO: 170945 - DNA, 15 bp, Homo sapiens
tttattttcttatgt

SEQ ID NO: 170946 - DNA, 15 bp, Homo sapiens
ttattttcttatgta

SEQ ID NO: 170947 - DNA, 15 bp, Homo sapiens
tattttcttatgtaa

SEQ ID NO: 170948 - DNA, 15 bp, Homo sapiens
attttcttatgtaag

SEQ ID NO: 170949 - DNA, 15 bp, Homo sapiens
ttttcttatgtaagt

SEQ ID NO: 170950 - DNA, 15 bp, Homo sapiens
tttcttatgtaagtt

SEQ ID NO: 170951 - DNA, 15 bp, Homo sapiens
ttcttatgtaagttt

SEQ ID NO: 170952 - DNA, 15 bp, Homo sapiens
tcttatgtaagtttg

SEQ ID NO: 170953 - DNA, 15 bp, Homo sapiens
cttatgtaagtttgc

SEQ ID NO: 170954 - DNA, 15 bp, Homo sapiens
ttatgtaagtttgca

SEQ ID NO: 170955 - DNA, 15 bp, Homo sapiens
tatgtaagtttgcat

SEQ ID NO: 170956 - DNA, 15 bp, Homo sapiens
atgtaagtttgcata

SEQ ID NO: 170957 - DNA, 15 bp, Homo sapiens
tgtaagtttgcatat

SEQ ID NO: 170958 - DNA, 15 bp, Homo sapiens
gtaagtttgcatatc

SEQ ID NO: 170959 - DNA, 15 bp, Homo sapiens
taagtttgcatatca

SEQ ID NO: 170960 - DNA, 15 bp, Homo sapiens
aagtttgcatatcag

SEQ ID NO: 170961 - DNA, 15 bp, Homo sapiens
agtttgcatatcagt

SEQ ID NO: 170962 - DNA, 15 bp, Homo sapiens
gtttgcatatcagtc

SEQ ID NO: 170963 - DNA, 15 bp, Homo sapiens
tttgcatatcagtca

SEQ ID NO: 170964 - DNA, 15 bp, Homo sapiens
ttgcatatcagtcat

SEQ ID NO: 170965 - DNA, 15 bp, Homo sapiens
tgcatatcagtcatg

SEQ ID NO: 170966 - DNA, 15 bp, Homo sapiens
gcatatcagtcatga

SEQ ID NO: 170967 - DNA, 15 bp, Homo sapiens
catatcagtcatgac

SEQ ID NO: 170968 - DNA, 15 bp, Homo sapiens
atatcagtcatgact

SEQ ID NO: 170969 - DNA, 15 bp, Homo sapiens
tatcagtcatgacta

SEQ ID NO: 170970 - DNA, 15 bp, Homo sapiens
atcagtcatgactag

SEQ ID NO: 170971 - DNA, 15 bp, Homo sapiens
tcagtcatgactagt

SEQ ID NO: 170972 - DNA, 15 bp, Homo sapiens
cagtcatgactagtg

SEQ ID NO: 170973 - DNA, 15 bp, Homo sapiens
agtcatgactagtgc

SEQ ID NO: 170974 - DNA, 15 bp, Homo sapiens
gtcatgactagtgcc

SEQ ID NO: 170975 - DNA, 15 bp, Homo sapiens
tcatgactagtgcct

SEQ ID NO: 170976 - DNA, 15 bp, Homo sapiens
catgactagtgccta

SEQ ID NO: 170977 - DNA, 15 bp, Homo sapiens
atgactagtgcctag

SEQ ID NO: 170978 - DNA, 15 bp, Homo sapiens
tgactagtgcctaga

SEQ ID NO: 170979 - DNA, 15 bp, Homo sapiens
gactagtgcctagaa

SEQ ID NO: 170980 - DNA, 15 bp, Homo sapiens
actagtgcctagaaa

SEQ ID NO: 170981 - DNA, 15 bp, Homo sapiens
ctagtgcctagaaag

SEQ ID NO: 170982 - DNA, 15 bp, Homo sapiens
tagtgcctagaaagc

SEQ ID NO: 170983 - DNA, 15 bp, Homo sapiens
agtgcctagaaagca

SEQ ID NO: 170984 - DNA, 15 bp, Homo sapiens
gtgcctagaaagcaa

SEQ ID NO: 170985 - DNA, 15 bp, Homo sapiens
tgcctagaaagcaat

SEQ ID NO: 170986 - DNA, 15 bp, Homo sapiens
gcctagaaagcaatg

SEQ ID NO: 170987 - DNA, 15 bp, Homo sapiens
cctagaaagcaatgt

SEQ ID NO: 170988 - DNA, 15 bp, Homo sapiens
ctagaaagcaatgtg

SEQ ID NO: 170989 - DNA, 15 bp, Homo sapiens
tagaaagcaatgtga

SEQ ID NO: 170990 - DNA, 15 bp, Homo sapiens
agaaagcaatgtgat

SEQ ID NO: 170991 - DNA, 15 bp, Homo sapiens
gaaagcaatgtgatg

SEQ ID NO: 170992 - DNA, 15 bp, Homo sapiens
aaagcaatgtgatgg

SEQ ID NO: 170993 - DNA, 15 bp, Homo sapiens
aagcaatgtgatggt

SEQ ID NO: 170994 - DNA, 15 bp, Homo sapiens
agcaatgtgatggtc

SEQ ID NO: 170995 - DNA, 15 bp, Homo sapiens
gcaatgtgatggtca

SEQ ID NO: 170996 - DNA, 15 bp, Homo sapiens
caatgtgatggtcag

SEQ ID NO: 170997 - DNA, 15 bp, Homo sapiens
aatgtgatggtcagg

SEQ ID NO: 170998 - DNA, 15 bp, Homo sapiens
atgtgatggtcagga

SEQ ID NO: 170999 - DNA, 15 bp, Homo sapiens
tgtgatggtcaggat

SEQ ID NO: 171000 - DNA, 15 bp, Homo sapiens
gtgatggtcaggatc

SEQ ID NO: 171001 - DNA, 15 bp, Homo sapiens
tgatggtcaggatct

SEQ ID NO: 171002 - DNA, 15 bp, Homo sapiens
gatggtcaggatctc

SEQ ID NO: 171003 - DNA, 15 bp, Homo sapiens
atggtcaggatctca

SEQ ID NO: 171004 - DNA, 15 bp, Homo sapiens
tggtcaggatctcat

SEQ ID NO: 171005 - DNA, 15 bp, Homo sapiens
ggtcaggatctcatg

SEQ ID NO: 171006 - DNA, 15 bp, Homo sapiens
gtcaggatctcatga

SEQ ID NO: 171007 - DNA, 15 bp, Homo sapiens
tcaggatctcatgac

SEQ ID NO: 171008 - DNA, 15 bp, Homo sapiens
caggatctcatgaca

SEQ ID NO: 171009 - DNA, 15 bp, Homo sapiens
aggatctcatgacat

SEQ ID NO: 171010 - DNA, 15 bp, Homo sapiens
ggatctcatgacatt

SEQ ID NO: 171011 - DNA, 15 bp, Homo sapiens
gatctcatgacatta

SEQ ID NO: 171012 - DNA, 15 bp, Homo sapiens
atctcatgacattat

SEQ ID NO: 171013 - DNA, 15 bp, Homo sapiens
tctcatgacattata

SEQ ID NO: 171014 - DNA, 15 bp, Homo sapiens
ctcatgacattatat

SEQ ID NO: 171015 - DNA, 15 bp, Homo sapiens
tcatgacattatatt

SEQ ID NO: 171016 - DNA, 15 bp, Homo sapiens
catgacattatattt

SEQ ID NO: 171017 - DNA, 15 bp, Homo sapiens
atgacattatatttg

SEQ ID NO: 171018 - DNA, 15 bp, Homo sapiens
tgacattatatttga

SEQ ID NO: 171019 - DNA, 15 bp, Homo sapiens
gacattatatttgag

SEQ ID NO: 171020 - DNA, 15 bp, Homo sapiens
acattatatttgagt

SEQ ID NO: 171021 - DNA, 15 bp, Homo sapiens
cattatatttgagtt

SEQ ID NO: 171022 - DNA, 15 bp, Homo sapiens
attatatttgagttt

SEQ ID NO: 171023 - DNA, 15 bp, Homo sapiens
ttatatttgagtttc

SEQ ID NO: 171024 - DNA, 15 bp, Homo sapiens
tatatttgagtttct

SEQ ID NO: 171025 - DNA, 15 bp, Homo sapiens
atatttgagtttctt

SEQ ID NO: 171026 - DNA, 15 bp, Homo sapiens
tatttgagtttcttt

SEQ ID NO: 171027 - DNA, 15 bp, Homo sapiens
atttgagtttctttc

SEQ ID NO: 171028 - DNA, 15 bp, Homo sapiens
tttgagtttctttca

SEQ ID NO: 171029 - DNA, 15 bp, Homo sapiens
ttgagtttctttcag

SEQ ID NO: 171030 - DNA, 15 bp, Homo sapiens
tgagtttctttcaga

SEQ ID NO: 171031 - DNA, 15 bp, Homo sapiens
gagtttctttcagat

SEQ ID NO: 171032 - DNA, 15 bp, Homo sapiens
agtttctttcagatc

SEQ ID NO: 171033 - DNA, 15 bp, Homo sapiens
gtttctttcagatca

SEQ ID NO: 171034 - DNA, 15 bp, Homo sapiens
tttctttcagatcat

SEQ ID NO: 171035 - DNA, 15 bp, Homo sapiens
ttctttcagatcatt

SEQ ID NO: 171036 - DNA, 15 bp, Homo sapiens
tctttcagatcattt

SEQ ID NO: 171037 - DNA, 15 bp, Homo sapiens
ctttcagatcattta

SEQ ID NO: 171038 - DNA, 15 bp, Homo sapiens
tttcagatcatttag

SEQ ID NO: 171039 - DNA, 15 bp, Homo sapiens
ttcagatcatttagg

SEQ ID NO: 171040 - DNA, 15 bp, Homo sapiens
tcagatcatttagga

SEQ ID NO: 171041 - DNA, 15 bp, Homo sapiens
cagatcatttaggat

SEQ ID NO: 171042 - DNA, 15 bp, Homo sapiens
agatcatttaggata

SEQ ID NO: 171043 - DNA, 15 bp, Homo sapiens
gatcatttaggatac

SEQ ID NO: 171044 - DNA, 15 bp, Homo sapiens
atcatttaggatact

SEQ ID NO: 171045 - DNA, 15 bp, Homo sapiens
tcatttaggatactc

SEQ ID NO: 171046 - DNA, 15 bp, Homo sapiens
catttaggatactct

SEQ ID NO: 171047 - DNA, 15 bp, Homo sapiens
atttaggatactctt

SEQ ID NO: 171048 - DNA, 15 bp, Homo sapiens
tttaggatactctta

SEQ ID NO: 171049 - DNA, 15 bp, Homo sapiens
ttaggatactcttaa

SEQ ID NO: 171050 - DNA, 15 bp, Homo sapiens
taggatactcttaat

SEQ ID NO: 171051 - DNA, 15 bp, Homo sapiens
aggatactcttaatc

SEQ ID NO: 171052 - DNA, 15 bp, Homo sapiens
ggatactcttaatct

SEQ ID NO: 171053 - DNA, 15 bp, Homo sapiens
gatactcttaatctc

SEQ ID NO: 171054 - DNA, 15 bp, Homo sapiens
atactcttaatctca

SEQ ID NO: 171055 - DNA, 15 bp, Homo sapiens
tactcttaatctcac

SEQ ID NO: 171056 - DNA, 15 bp, Homo sapiens
actcttaatctcact

SEQ ID NO: 171057 - DNA, 15 bp, Homo sapiens
ctcttaatctcactt

SEQ ID NO: 171058 - DNA, 15 bp, Homo sapiens
tcttaatctcacttc

SEQ ID NO: 171059 - DNA, 15 bp, Homo sapiens
cttaatctcacttca

SEQ ID NO: 171060 - DNA, 15 bp, Homo sapiens
ttaatctcacttcat

SEQ ID NO: 171061 - DNA, 15 bp, Homo sapiens
taatctcacttcatc

SEQ ID NO: 171062 - DNA, 15 bp, Homo sapiens
aatctcacttcatca

SEQ ID NO: 171063 - DNA, 15 bp, Homo sapiens
atctcacttcatcaa

SEQ ID NO: 171064 - DNA, 15 bp, Homo sapiens
tctcacttcatcaat

SEQ ID NO: 171065 - DNA, 15 bp, Homo sapiens
ctcacttcatcaatc

SEQ ID NO: 171066 - DNA, 15 bp, Homo sapiens
tcacttcatcaatca

SEQ ID NO: 171067 - DNA, 15 bp, Homo sapiens
cacttcatcaatcaa

SEQ ID NO: 171068 - DNA, 15 bp, Homo sapiens
acttcatcaatcaaa

SEQ ID NO: 171069 - DNA, 15 bp, Homo sapiens
cttcatcaatcaaat

SEQ ID NO: 171070 - DNA, 15 bp, Homo sapiens
ttcatcaatcaaata

SEQ ID NO: 171071 - DNA, 15 bp, Homo sapiens
tcatcaatcaaatat

SEQ ID NO: 171072 - DNA, 15 bp, Homo sapiens
catcaatcaaatatt

SEQ ID NO: 171073 - DNA, 15 bp, Homo sapiens
atcaatcaaatattt

SEQ ID NO: 171074 - DNA, 15 bp, Homo sapiens
tcaatcaaatatttt

SEQ ID NO: 171075 - DNA, 15 bp, Homo sapiens
caatcaaatattttt

SEQ ID NO: 171076 - DNA, 15 bp, Homo sapiens
aatcaaatatttttt

SEQ ID NO: 171077 - DNA, 15 bp, Homo sapiens
atcaaatattttttg

SEQ ID NO: 171078 - DNA, 15 bp, Homo sapiens
tcaaatattttttga

SEQ ID NO: 171079 - DNA, 15 bp, Homo sapiens
caaatattttttgag

SEQ ID NO: 171080 - DNA, 15 bp, Homo sapiens
aaatattttttgagt

SEQ ID NO: 171081 - DNA, 15 bp, Homo sapiens
aatattttttgagtg

SEQ ID NO: 171082 - DNA, 15 bp, Homo sapiens
atattttttgagtgt

SEQ ID NO: 171083 - DNA, 15 bp, Homo sapiens
tattttttgagtgta

SEQ ID NO: 171084 - DNA, 15 bp, Homo sapiens
attttttgagtgtat

SEQ ID NO: 171085 - DNA, 15 bp, Homo sapiens
ttttttgagtgtatg

SEQ ID NO: 171086 - DNA, 15 bp, Homo sapiens
tttttgagtgtatgc

SEQ ID NO: 171087 - DNA, 15 bp, Homo sapiens
ttttgagtgtatgct

SEQ ID NO: 171088 - DNA, 15 bp, Homo sapiens
tttgagtgtatgctg

SEQ ID NO: 171089 - DNA, 15 bp, Homo sapiens
ttgagtgtatgctgt

SEQ ID NO: 171090 - DNA, 15 bp, Homo sapiens
tgagtgtatgctgta

SEQ ID NO: 171091 - DNA, 15 bp, Homo sapiens
gagtgtatgctgtag

SEQ ID NO: 171092 - DNA, 15 bp, Homo sapiens
agtgtatgctgtagc

SEQ ID NO: 171093 - DNA, 15 bp, Homo sapiens
gtgtatgctgtagct

SEQ ID NO: 171094 - DNA, 15 bp, Homo sapiens
tgtatgctgtagctg

SEQ ID NO: 171095 - DNA, 15 bp, Homo sapiens
gtatgctgtagctga

SEQ ID NO: 171096 - DNA, 15 bp, Homo sapiens
tatgctgtagctgaa

SEQ ID NO: 171097 - DNA, 15 bp, Homo sapiens
atgctgtagctgaaa

SEQ ID NO: 171098 - DNA, 15 bp, Homo sapiens
tgctgtagctgaaag

SEQ ID NO: 171099 - DNA, 15 bp, Homo sapiens
gctgtagctgaaaga

SEQ ID NO: 171100 - DNA, 15 bp, Homo sapiens
ctgtagctgaaagag

SEQ ID NO: 171101 - DNA, 15 bp, Homo sapiens
tgtagctgaaagagt

SEQ ID NO: 171102 - DNA, 15 bp, Homo sapiens
gtagctgaaagagta

SEQ ID NO: 171103 - DNA, 15 bp, Homo sapiens
tagctgaaagagtat

SEQ ID NO: 171104 - DNA, 15 bp, Homo sapiens
agctgaaagagtatg

SEQ ID NO: 171105 - DNA, 15 bp, Homo sapiens
gctgaaagagtatgt

SEQ ID NO: 171106 - DNA, 15 bp, Homo sapiens
ctgaaagagtatgta

SEQ ID NO: 171107 - DNA, 15 bp, Homo sapiens
tgaaagagtatgtac

SEQ ID NO: 171108 - DNA, 15 bp, Homo sapiens
gaaagagtatgtacg

SEQ ID NO: 171109 - DNA, 15 bp, Homo sapiens
aaagagtatgtacgt

SEQ ID NO: 171110 - DNA, 15 bp, Homo sapiens
aagagtatgtacgta

SEQ ID NO: 171111 - DNA, 15 bp, Homo sapiens
agagtatgtacgtac

SEQ ID NO: 171112 - DNA, 15 bp, Homo sapiens
gagtatgtacgtacg

SEQ ID NO: 171113 - DNA, 15 bp, Homo sapiens
agtatgtacgtacgt

SEQ ID NO: 171114 - DNA, 15 bp, Homo sapiens
gtatgtacgtacgta

SEQ ID NO: 171115 - DNA, 15 bp, Homo sapiens
tatgtacgtacgtat

SEQ ID NO: 171116 - DNA, 15 bp, Homo sapiens
atgtacgtacgtata

SEQ ID NO: 171117 - DNA, 15 bp, Homo sapiens
tgtacgtacgtataa

SEQ ID NO: 171118 - DNA, 15 bp, Homo sapiens
gtacgtacgtataag

SEQ ID NO: 171119 - DNA, 15 bp, Homo sapiens
tacgtacgtataaga

SEQ ID NO: 171120 - DNA, 15 bp, Homo sapiens
acgtacgtataagac

SEQ ID NO: 171121 - DNA, 15 bp, Homo sapiens
cgtacgtataagact

SEQ ID NO: 171122 - DNA, 15 bp, Homo sapiens
gtacgtataagacta

SEQ ID NO: 171123 - DNA, 15 bp, Homo sapiens
tacgtataagactag

SEQ ID NO: 171124 - DNA, 15 bp, Homo sapiens
acgtataagactaga

SEQ ID NO: 171125 - DNA, 15 bp, Homo sapiens
cgtataagactagag

SEQ ID NO: 171126 - DNA, 15 bp, Homo sapiens
gtataagactagaga

SEQ ID NO: 171127 - DNA, 15 bp, Homo sapiens
tataagactagagag

SEQ ID NO: 171128 - DNA, 15 bp, Homo sapiens
ataagactagagaga

SEQ ID NO: 171129 - DNA, 15 bp, Homo sapiens
taagactagagagat

SEQ ID NO: 171130 - DNA, 15 bp, Homo sapiens
aagactagagagata

SEQ ID NO: 171131 - DNA, 15 bp, Homo sapiens
agactagagagatat

SEQ ID NO: 171132 - DNA, 15 bp, Homo sapiens
ctagagagatattaa

SEQ ID NO: 171133 - DNA, 15 bp, Homo sapiens
tagagagatattaag

SEQ ID NO: 171134 - DNA, 15 bp, Homo sapiens
agagagatattaagt

SEQ ID NO: 171135 - DNA, 15 bp, Homo sapiens
gagagatattaagtc

SEQ ID NO: 171136 - DNA, 15 bp, Homo sapiens
agagatattaagtct

SEQ ID NO: 171137 - DNA, 15 bp, Homo sapiens
gagatattaagtctc

SEQ ID NO: 171138 - DNA, 15 bp, Homo sapiens
agatattaagtctca

SEQ ID NO: 171139 - DNA, 15 bp, Homo sapiens
gatattaagtctcag

SEQ ID NO: 171140 - DNA, 15 bp, Homo sapiens
atattaagtctcagt

SEQ ID NO: 171141 - DNA, 15 bp, Homo sapiens
tattaagtctcagta

SEQ ID NO: 171142 - DNA, 15 bp, Homo sapiens
attaagtctcagtac

SEQ ID NO: 171143 - DNA, 15 bp, Homo sapiens
ttaagtctcagtaca

SEQ ID NO: 171144 - DNA, 15 bp, Homo sapiens
taagtctcagtacac

SEQ ID NO: 171145 - DNA, 15 bp, Homo sapiens
aagtctcagtacact

SEQ ID NO: 171146 - DNA, 15 bp, Homo sapiens
agtctcagtacactt

SEQ ID NO: 171147 - DNA, 15 bp, Homo sapiens
gtctcagtacacttc

SEQ ID NO: 171148 - DNA, 15 bp, Homo sapiens
tctcagtacacttcc

SEQ ID NO: 171149 - DNA, 15 bp, Homo sapiens
ctcagtacacttcct

SEQ ID NO: 171150 - DNA, 15 bp, Homo sapiens
tcagtacacttcctg

SEQ ID NO: 171151 - DNA, 15 bp, Homo sapiens
cagtacacttcctgt

SEQ ID NO: 171152 - DNA, 15 bp, Homo sapiens
agtacacttcctgtg

SEQ ID NO: 171153 - DNA, 15 bp, Homo sapiens
gtacacttcctgtgc

SEQ ID NO: 171154 - DNA, 15 bp, Homo sapiens
tacacttcctgtgcc

SEQ ID NO: 171155 - DNA, 15 bp, Homo sapiens
acacttcctgtgcca

SEQ ID NO: 171156 - DNA, 15 bp, Homo sapiens
cacttcctgtgccat

SEQ ID NO: 171157 - DNA, 15 bp, Homo sapiens
acttcctgtgccatg

SEQ ID NO: 171158 - DNA, 15 bp, Homo sapiens
cttcctgtgccatgt

SEQ ID NO: 171159 - DNA, 15 bp, Homo sapiens
ttcctgtgccatgtt

SEQ ID NO: 171160 - DNA, 15 bp, Homo sapiens
tcctgtgccatgtta

SEQ ID NO: 171161 - DNA, 15 bp, Homo sapiens
cctgtgccatgttat

SEQ ID NO: 171162 - DNA, 15 bp, Homo sapiens
ctgtgccatgttatt

SEQ ID NO: 171163 - DNA, 15 bp, Homo sapiens
tgtgccatgttattc

SEQ ID NO: 171164 - DNA, 15 bp, Homo sapiens
gtgccatgttattca

SEQ ID NO: 171165 - DNA, 15 bp, Homo sapiens
tgccatgttattcag

SEQ ID NO: 171166 - DNA, 15 bp, Homo sapiens
gccatgttattcagc

SEQ ID NO: 171167 - DNA, 15 bp, Homo sapiens
ccatgttattcagct

SEQ ID NO: 171168 - DNA, 15 bp, Homo sapiens
catgttattcagctc

SEQ ID NO: 171169 - DNA, 15 bp, Homo sapiens
atgttattcagctca

SEQ ID NO: 171170 - DNA, 15 bp, Homo sapiens
tgttattcagctcac

SEQ ID NO: 171171 - DNA, 15 bp, Homo sapiens
gttattcagctcact

SEQ ID NO: 171172 - DNA, 15 bp, Homo sapiens
ttattcagctcactg

SEQ ID NO: 171173 - DNA, 15 bp, Homo sapiens
tattcagctcactgg

SEQ ID NO: 171174 - DNA, 15 bp, Homo sapiens
attcagctcactggt

SEQ ID NO: 171175 - DNA, 15 bp, Homo sapiens
ttcagctcactggtt

SEQ ID NO: 171176 - DNA, 15 bp, Homo sapiens
tcagctcactggttt

SEQ ID NO: 171177 - DNA, 15 bp, Homo sapiens
cagctcactggttta

SEQ ID NO: 171178 - DNA, 15 bp, Homo sapiens
agctcactggtttac

SEQ ID NO: 171179 - DNA, 15 bp, Homo sapiens
gctcactggtttaca

SEQ ID NO: 171180 - DNA, 15 bp, Homo sapiens
ctcactggtttacaa

SEQ ID NO: 171181 - DNA, 15 bp, Homo sapiens
tcactggtttacaaa

SEQ ID NO: 171182 - DNA, 15 bp, Homo sapiens
cactggtttacaaat

SEQ ID NO: 171183 - DNA, 15 bp, Homo sapiens
actggtttacaaata

SEQ ID NO: 171184 - DNA, 15 bp, Homo sapiens
ctggtttacaaatat

SEQ ID NO: 171185 - DNA, 15 bp, Homo sapiens
tggtttacaaatata

SEQ ID NO: 171186 - DNA, 15 bp, Homo sapiens
ggtttacaaatatag

SEQ ID NO: 171187 - DNA, 15 bp, Homo sapiens
gtttacaaatatagg

SEQ ID NO: 171188 - DNA, 15 bp, Homo sapiens
tttacaaatataggt

SEQ ID NO: 171189 - DNA, 15 bp, Homo sapiens
ttacaaatataggtt

SEQ ID NO: 171190 - DNA, 15 bp, Homo sapiens
tacaaatataggttg

SEQ ID NO: 171191 - DNA, 15 bp, Homo sapiens
acaaatataggttgt

SEQ ID NO: 171192 - DNA, 15 bp, Homo sapiens
caaatataggttgtc

SEQ ID NO: 171193 - DNA, 15 bp, Homo sapiens
aaatataggttgtct

SEQ ID NO: 171194 - DNA, 15 bp, Homo sapiens
aatataggttgtctt

SEQ ID NO: 171195 - DNA, 15 bp, Homo sapiens
atataggttgtcttg

SEQ ID NO: 171196 - DNA, 15 bp, Homo sapiens
tataggttgtcttgt

SEQ ID NO: 171197 - DNA, 15 bp, Homo sapiens
ataggttgtcttgtg

SEQ ID NO: 171198 - DNA, 15 bp, Homo sapiens
taggttgtcttgtgg

SEQ ID NO: 171199 - DNA, 15 bp, Homo sapiens
aggttgtcttgtggt

SEQ ID NO: 171200 - DNA, 15 bp, Homo sapiens
ggttgtcttgtggtt

SEQ ID NO: 171201 - DNA, 15 bp, Homo sapiens
gttgtcttgtggttg

SEQ ID NO: 171202 - DNA, 15 bp, Homo sapiens
ttgtcttgtggttgt

SEQ ID NO: 171203 - DNA, 15 bp, Homo sapiens
tgtcttgtggttgta

SEQ ID NO: 171204 - DNA, 15 bp, Homo sapiens
gtcttgtggttgtag

SEQ ID NO: 171205 - DNA, 15 bp, Homo sapiens
tcttgtggttgtagg

SEQ ID NO: 171206 - DNA, 15 bp, Homo sapiens
cttgtggttgtagga

SEQ ID NO: 171207 - DNA, 15 bp, Homo sapiens
ttgtggttgtaggag

SEQ ID NO: 171208 - DNA, 15 bp, Homo sapiens
tgtggttgtaggagc

SEQ ID NO: 171209 - DNA, 15 bp, Homo sapiens
gtggttgtaggagcc

SEQ ID NO: 171210 - DNA, 15 bp, Homo sapiens
tggttgtaggagccc

SEQ ID NO: 171211 - DNA, 15 bp, Homo sapiens
ggttgtaggagccca

SEQ ID NO: 171212 - DNA, 15 bp, Homo sapiens
gttgtaggagcccac

SEQ ID NO: 171213 - DNA, 15 bp, Homo sapiens
ttgtaggagcccact

SEQ ID NO: 171214 - DNA, 15 bp, Homo sapiens
tgtaggagcccactg

SEQ ID NO: 171215 - DNA, 15 bp, Homo sapiens
gtaggagcccactgt

SEQ ID NO: 171216 - DNA, 15 bp, Homo sapiens
taggagcccactgta

SEQ ID NO: 171217 - DNA, 15 bp, Homo sapiens
aggagcccactgtaa

SEQ ID NO: 171218 - DNA, 15 bp, Homo sapiens
ggagcccactgtaac

SEQ ID NO: 171219 - DNA, 15 bp, Homo sapiens
gagcccactgtaaca

SEQ ID NO: 171220 - DNA, 15 bp, Homo sapiens
agcccactgtaacaa

SEQ ID NO: 171221 - DNA, 15 bp, Homo sapiens
gcccactgtaacaat

SEQ ID NO: 171222 - DNA, 15 bp, Homo sapiens
cccactgtaacaata

SEQ ID NO: 171223 - DNA, 15 bp, Homo sapiens
ccactgtaacaatac

SEQ ID NO: 171224 - DNA, 15 bp, Homo sapiens
cactgtaacaatact

SEQ ID NO: 171225 - DNA, 15 bp, Homo sapiens
actgtaacaatactg

SEQ ID NO: 171226 - DNA, 15 bp, Homo sapiens
ctgtaacaatactgg

SEQ ID NO: 171227 - DNA, 15 bp, Homo sapiens
tgtaacaatactggg

SEQ ID NO: 171228 - DNA, 15 bp, Homo sapiens
gtaacaatactgggc

SEQ ID NO: 171229 - DNA, 15 bp, Homo sapiens
taacaatactgggca

SEQ ID NO: 171230 - DNA, 15 bp, Homo sapiens
aacaatactgggcag

SEQ ID NO: 171231 - DNA, 15 bp, Homo sapiens
acaatactgggcagc

SEQ ID NO: 171232 - DNA, 15 bp, Homo sapiens
caatactgggcagcc

SEQ ID NO: 171233 - DNA, 15 bp, Homo sapiens
aatactgggcagcct

SEQ ID NO: 171234 - DNA, 15 bp, Homo sapiens
atactgggcagcctt

SEQ ID NO: 171235 - DNA, 15 bp, Homo sapiens
tactgggcagccttt

SEQ ID NO: 171236 - DNA, 15 bp, Homo sapiens
actgggcagcctttt

SEQ ID NO: 171237 - DNA, 15 bp, Homo sapiens
ctgggcagccttttt

SEQ ID NO: 171238 - DNA, 15 bp, Homo sapiens
tgggcagcctttttt

SEQ ID NO: 171239 - DNA, 15 bp, Homo sapiens
gggcagccttttttt

SEQ ID NO: 171240 - DNA, 15 bp, Homo sapiens
ggcagcctttttttt

SEQ ID NO: 171241 - DNA, 15 bp, Homo sapiens
gcagccttttttttt

SEQ ID NO: 171242 - DNA, 15 bp, Homo sapiens
cagcctttttttttt

SEQ ID NO: 171243 - DNA, 15 bp, Homo sapiens
agccttttttttttt

SEQ ID NO: 171244 - DNA, 15 bp, Homo sapiens
gcctttttttttttt

SEQ ID NO: 171245 - DNA, 15 bp, Homo sapiens
ttttttttttttaat

SEQ ID NO: 171246 - DNA, 15 bp, Homo sapiens
ttttttttttaattg

SEQ ID NO: 171247 - DNA, 15 bp, Homo sapiens
tttttttttaattgc

SEQ ID NO: 171248 - DNA, 15 bp, Homo sapiens
ttttttttaattgca

SEQ ID NO: 171249 - DNA, 15 bp, Homo sapiens
tttttttaattgcaa

SEQ ID NO: 171250 - DNA, 15 bp, Homo sapiens
ttttttaattgcaac

SEQ ID NO: 171251 - DNA, 15 bp, Homo sapiens
tttttaattgcaaca

SEQ ID NO: 171252 - DNA, 15 bp, Homo sapiens
ttttaattgcaacaa

SEQ ID NO: 171253 - DNA, 15 bp, Homo sapiens
tttaattgcaacaat

SEQ ID NO: 171254 - DNA, 15 bp, Homo sapiens
ttaattgcaacaatg

SEQ ID NO: 171255 - DNA, 15 bp, Homo sapiens
taattgcaacaatgc

SEQ ID NO: 171256 - DNA, 15 bp, Homo sapiens
aattgcaacaatgca

SEQ ID NO: 171257 - DNA, 15 bp, Homo sapiens
attgcaacaatgcaa

SEQ ID NO: 171258 - DNA, 15 bp, Homo sapiens
ttgcaacaatgcaaa

SEQ ID NO: 171259 - DNA, 15 bp, Homo sapiens
tgcaacaatgcaaaa

SEQ ID NO: 171260 - DNA, 15 bp, Homo sapiens
gcaacaatgcaaaag

SEQ ID NO: 171261 - DNA, 15 bp, Homo sapiens
caacaatgcaaaagc

SEQ ID NO: 171262 - DNA, 15 bp, Homo sapiens
aacaatgcaaaagcc

SEQ ID NO: 171263 - DNA, 15 bp, Homo sapiens
acaatgcaaaagcca

SEQ ID NO: 171264 - DNA, 15 bp, Homo sapiens
caatgcaaaagccaa

SEQ ID NO: 171265 - DNA, 15 bp, Homo sapiens
aatgcaaaagccaag

SEQ ID NO: 171266 - DNA, 15 bp, Homo sapiens
atgcaaaagccaaga

SEQ ID NO: 171267 - DNA, 15 bp, Homo sapiens
tgcaaaagccaagaa

SEQ ID NO: 171268 - DNA, 15 bp, Homo sapiens
gcaaaagccaagaaa

SEQ ID NO: 171269 - DNA, 15 bp, Homo sapiens
caaaagccaagaaag

SEQ ID NO: 171270 - DNA, 15 bp, Homo sapiens
aaaagccaagaaagt

SEQ ID NO: 171271 - DNA, 15 bp, Homo sapiens
aaagccaagaaagta

SEQ ID NO: 171272 - DNA, 15 bp, Homo sapiens
aagccaagaaagtat

SEQ ID NO: 171273 - DNA, 15 bp, Homo sapiens
agccaagaaagtata

SEQ ID NO: 171274 - DNA, 15 bp, Homo sapiens
gccaagaaagtataa

SEQ ID NO: 171275 - DNA, 15 bp, Homo sapiens
ccaagaaagtataag

SEQ ID NO: 171276 - DNA, 15 bp, Homo sapiens
caagaaagtataagg

SEQ ID NO: 171277 - DNA, 15 bp, Homo sapiens
aagaaagtataaggg

SEQ ID NO: 171278 - DNA, 15 bp, Homo sapiens
agaaagtataagggt

SEQ ID NO: 171279 - DNA, 15 bp, Homo sapiens
gaaagtataagggtc

SEQ ID NO: 171280 - DNA, 15 bp, Homo sapiens
aaagtataagggtca

SEQ ID NO: 171281 - DNA, 15 bp, Homo sapiens
aagtataagggtcac

SEQ ID NO: 171282 - DNA, 15 bp, Homo sapiens
agtataagggtcaca

SEQ ID NO: 171283 - DNA, 15 bp, Homo sapiens
gtataagggtcacaa

SEQ ID NO: 171284 - DNA, 15 bp, Homo sapiens
tataagggtcacaag

SEQ ID NO: 171285 - DNA, 15 bp, Homo sapiens
ataagggtcacaagt

SEQ ID NO: 171286 - DNA, 15 bp, Homo sapiens
taagggtcacaagtc

SEQ ID NO: 171287 - DNA, 15 bp, Homo sapiens
aagggtcacaagtct

SEQ ID NO: 171288 - DNA, 15 bp, Homo sapiens
agggtcacaagtcta

SEQ ID NO: 171289 - DNA, 15 bp, Homo sapiens
gggtcacaagtctaa

SEQ ID NO: 171290 - DNA, 15 bp, Homo sapiens
ggtcacaagtctaaa

SEQ ID NO: 171291 - DNA, 15 bp, Homo sapiens
gtcacaagtctaaac

SEQ ID NO: 171292 - DNA, 15 bp, Homo sapiens
tcacaagtctaaaca

SEQ ID NO: 171293 - DNA, 15 bp, Homo sapiens
cacaagtctaaacaa

SEQ ID NO: 171294 - DNA, 15 bp, Homo sapiens
acaagtctaaacaat

SEQ ID NO: 171295 - DNA, 15 bp, Homo sapiens
caagtctaaacaatg

SEQ ID NO: 171296 - DNA, 15 bp, Homo sapiens
aagtctaaacaatga

SEQ ID NO: 171297 - DNA, 15 bp, Homo sapiens
agtctaaacaatgaa

SEQ ID NO: 171298 - DNA, 15 bp, Homo sapiens
gtctaaacaatgaat

SEQ ID NO: 171299 - DNA, 15 bp, Homo sapiens
tctaaacaatgaatt

SEQ ID NO: 171300 - DNA, 15 bp, Homo sapiens
ctaaacaatgaattc

SEQ ID NO: 171301 - DNA, 15 bp, Homo sapiens
taaacaatgaattct

SEQ ID NO: 171302 - DNA, 15 bp, Homo sapiens
aaacaatgaattctt

SEQ ID NO: 171303 - DNA, 15 bp, Homo sapiens
aacaatgaattcttc

SEQ ID NO: 171304 - DNA, 15 bp, Homo sapiens
acaatgaattcttca

SEQ ID NO: 171305 - DNA, 15 bp, Homo sapiens
caatgaattcttcaa

SEQ ID NO: 171306 - DNA, 15 bp, Homo sapiens
aatgaattcttcaac

SEQ ID NO: 171307 - DNA, 15 bp, Homo sapiens
atgaattcttcaaca

SEQ ID NO: 171308 - DNA, 15 bp, Homo sapiens
tgaattcttcaacag

SEQ ID NO: 171309 - DNA, 15 bp, Homo sapiens
gaattcttcaacagg

SEQ ID NO: 171310 - DNA, 15 bp, Homo sapiens
aattcttcaacaggg

SEQ ID NO: 171311 - DNA, 15 bp, Homo sapiens
attcttcaacaggga

SEQ ID NO: 171312 - DNA, 15 bp, Homo sapiens
ttcttcaacagggaa

SEQ ID NO: 171313 - DNA, 15 bp, Homo sapiens
tcttcaacagggaaa

SEQ ID NO: 171314 - DNA, 15 bp, Homo sapiens
cttcaacagggaaaa

SEQ ID NO: 171315 - DNA, 15 bp, Homo sapiens
ttcaacagggaaaac

SEQ ID NO: 171316 - DNA, 15 bp, Homo sapiens
tcaacagggaaaaca

SEQ ID NO: 171317 - DNA, 15 bp, Homo sapiens
caacagggaaaacag

SEQ ID NO: 171318 - DNA, 15 bp, Homo sapiens
aacagggaaaacagc

SEQ ID NO: 171319 - DNA, 15 bp, Homo sapiens
acagggaaaacagct

SEQ ID NO: 171320 - DNA, 15 bp, Homo sapiens
cagggaaaacagcta

SEQ ID NO: 171321 - DNA, 15 bp, Homo sapiens
agggaaaacagctag

SEQ ID NO: 171322 - DNA, 15 bp, Homo sapiens
gggaaaacagctagc

SEQ ID NO: 171323 - DNA, 15 bp, Homo sapiens
ggaaaacagctagct

SEQ ID NO: 171324 - DNA, 15 bp, Homo sapiens
gaaaacagctagctt

SEQ ID NO: 171325 - DNA, 15 bp, Homo sapiens
aaaacagctagcttg

SEQ ID NO: 171326 - DNA, 15 bp, Homo sapiens
aaacagctagcttga

SEQ ID NO: 171327 - DNA, 15 bp, Homo sapiens
aacagctagcttgaa

SEQ ID NO: 171328 - DNA, 15 bp, Homo sapiens
acagctagcttgaaa

SEQ ID NO: 171329 - DNA, 15 bp, Homo sapiens
cagctagcttgaaaa

SEQ ID NO: 171330 - DNA, 15 bp, Homo sapiens
agctagcttgaaaac

SEQ ID NO: 171331 - DNA, 15 bp, Homo sapiens
gctagcttgaaaact

SEQ ID NO: 171332 - DNA, 15 bp, Homo sapiens
ctagcttgaaaactt

SEQ ID NO: 171333 - DNA, 15 bp, Homo sapiens
tagcttgaaaacttg

SEQ ID NO: 171334 - DNA, 15 bp, Homo sapiens
agcttgaaaacttgc

SEQ ID NO: 171335 - DNA, 15 bp, Homo sapiens
gcttgaaaacttgct

SEQ ID NO: 171336 - DNA, 15 bp, Homo sapiens
cttgaaaacttgctg

SEQ ID NO: 171337 - DNA, 15 bp, Homo sapiens
ttgaaaacttgctga

SEQ ID NO: 171338 - DNA, 15 bp, Homo sapiens
tgaaaacttgctgaa

SEQ ID NO: 171339 - DNA, 15 bp, Homo sapiens
gaaaacttgctgaaa

SEQ ID NO: 171340 - DNA, 15 bp, Homo sapiens
aaaacttgctgaaaa

SEQ ID NO: 171341 - DNA, 15 bp, Homo sapiens
aaacttgctgaaaaa

SEQ ID NO: 171342 - DNA, 15 bp, Homo sapiens
aacttgctgaaaaac

SEQ ID NO: 171343 - DNA, 15 bp, Homo sapiens
acttgctgaaaaaca

SEQ ID NO: 171344 - DNA, 15 bp, Homo sapiens
cttgctgaaaaacac

SEQ ID NO: 171345 - DNA, 15 bp, Homo sapiens
ttgctgaaaaacaca

SEQ ID NO: 171346 - DNA, 15 bp, Homo sapiens
tgctgaaaaacacaa

SEQ ID NO: 171347 - DNA, 15 bp, Homo sapiens
gctgaaaaacacaac

SEQ ID NO: 171348 - DNA, 15 bp, Homo sapiens
ctgaaaaacacaact

SEQ ID NO: 171349 - DNA, 15 bp, Homo sapiens
tgaaaaacacaactt

SEQ ID NO: 171350 - DNA, 15 bp, Homo sapiens
gaaaaacacaacttg

SEQ ID NO: 171351 - DNA, 15 bp, Homo sapiens
aaaaacacaacttgt

SEQ ID NO: 171352 - DNA, 15 bp, Homo sapiens
aaaacacaacttgtg

SEQ ID NO: 171353 - DNA, 15 bp, Homo sapiens
aaacacaacttgtgt

SEQ ID NO: 171354 - DNA, 15 bp, Homo sapiens
aacacaacttgtgtt

SEQ ID NO: 171355 - DNA, 15 bp, Homo sapiens
acacaacttgtgttt

SEQ ID NO: 171356 - DNA, 15 bp, Homo sapiens
cacaacttgtgttta

SEQ ID NO: 171357 - DNA, 15 bp, Homo sapiens
acaacttgtgtttat

SEQ ID NO: 171358 - DNA, 15 bp, Homo sapiens
caacttgtgtttatg

SEQ ID NO: 171359 - DNA, 15 bp, Homo sapiens
aacttgtgtttatgg

SEQ ID NO: 171360 - DNA, 15 bp, Homo sapiens
acttgtgtttatggc

SEQ ID NO: 171361 - DNA, 15 bp, Homo sapiens
cttgtgtttatggca

SEQ ID NO: 171362 - DNA, 15 bp, Homo sapiens
ttgtgtttatggcat

SEQ ID NO: 171363 - DNA, 15 bp, Homo sapiens
tgtgtttatggcatt

SEQ ID NO: 171364 - DNA, 15 bp, Homo sapiens
gtgtttatggcattt

SEQ ID NO: 171365 - DNA, 15 bp, Homo sapiens
tgtttatggcattta

SEQ ID NO: 171366 - DNA, 15 bp, Homo sapiens
gtttatggcatttag

SEQ ID NO: 171367 - DNA, 15 bp, Homo sapiens
tttatggcatttagt

SEQ ID NO: 171368 - DNA, 15 bp, Homo sapiens
ttatggcatttagta

SEQ ID NO: 171369 - DNA, 15 bp, Homo sapiens
tatggcatttagtac

SEQ ID NO: 171370 - DNA, 15 bp, Homo sapiens
atggcatttagtacc

SEQ ID NO: 171371 - DNA, 15 bp, Homo sapiens
tggcatttagtacct

SEQ ID NO: 171372 - DNA, 15 bp, Homo sapiens
ggcatttagtacctt

SEQ ID NO: 171373 - DNA, 15 bp, Homo sapiens
gcatttagtaccttc

SEQ ID NO: 171374 - DNA, 15 bp, Homo sapiens
catttagtaccttca

SEQ ID NO: 171375 - DNA, 15 bp, Homo sapiens
atttagtaccttcaa

SEQ ID NO: 171376 - DNA, 15 bp, Homo sapiens
tttagtaccttcaaa

SEQ ID NO: 171377 - DNA, 15 bp, Homo sapiens
ttagtaccttcaaat

SEQ ID NO: 171378 - DNA, 15 bp, Homo sapiens
tagtaccttcaaata

SEQ ID NO: 171379 - DNA, 15 bp, Homo sapiens
agtaccttcaaataa

SEQ ID NO: 171380 - DNA, 15 bp, Homo sapiens
gtaccttcaaataat

SEQ ID NO: 171381 - DNA, 15 bp, Homo sapiens
taccttcaaataatt

SEQ ID NO: 171382 - DNA, 15 bp, Homo sapiens
accttcaaataattg

SEQ ID NO: 171383 - DNA, 15 bp, Homo sapiens
ccttcaaataattgg

SEQ ID NO: 171384 - DNA, 15 bp, Homo sapiens
cttcaaataattggc

SEQ ID NO: 171385 - DNA, 15 bp, Homo sapiens
ttcaaataattggct

SEQ ID NO: 171386 - DNA, 15 bp, Homo sapiens
tcaaataattggctt

SEQ ID NO: 171387 - DNA, 15 bp, Homo sapiens
caaataattggcttt

SEQ ID NO: 171388 - DNA, 15 bp, Homo sapiens
aaataattggctttg

SEQ ID NO: 171389 - DNA, 15 bp, Homo sapiens
aataattggctttgc

SEQ ID NO: 171390 - DNA, 15 bp, Homo sapiens
ataattggctttgca

SEQ ID NO: 171391 - DNA, 15 bp, Homo sapiens
taattggctttgcag

SEQ ID NO: 171392 - DNA, 15 bp, Homo sapiens
aattggctttgcaga

SEQ ID NO: 171393 - DNA, 15 bp, Homo sapiens
attggctttgcagat

SEQ ID NO: 171394 - DNA, 15 bp, Homo sapiens
ttggctttgcagata

SEQ ID NO: 171395 - DNA, 15 bp, Homo sapiens
tggctttgcagatat

SEQ ID NO: 171396 - DNA, 15 bp, Homo sapiens
ggctttgcagatatt

SEQ ID NO: 171397 - DNA, 15 bp, Homo sapiens
gctttgcagatattg

SEQ ID NO: 171398 - DNA, 15 bp, Homo sapiens
ctttgcagatattgg

SEQ ID NO: 171399 - DNA, 15 bp, Homo sapiens
tttgcagatattgga

SEQ ID NO: 171400 - DNA, 15 bp, Homo sapiens
ttgcagatattggat

SEQ ID NO: 171401 - DNA, 15 bp, Homo sapiens
tgcagatattggata

SEQ ID NO: 171402 - DNA, 15 bp, Homo sapiens
gcagatattggatac

SEQ ID NO: 171403 - DNA, 15 bp, Homo sapiens
cagatattggatacc

SEQ ID NO: 171404 - DNA, 15 bp, Homo sapiens
agatattggataccc

SEQ ID NO: 171405 - DNA, 15 bp, Homo sapiens
gatattggatacccc

SEQ ID NO: 171406 - DNA, 15 bp, Homo sapiens
atattggatacccca

SEQ ID NO: 171407 - DNA, 15 bp, Homo sapiens
tattggataccccat

SEQ ID NO: 171408 - DNA, 15 bp, Homo sapiens
attggataccccatt

SEQ ID NO: 171409 - DNA, 15 bp, Homo sapiens
ttggataccccatta

SEQ ID NO: 171410 - DNA, 15 bp, Homo sapiens
tggataccccattaa

SEQ ID NO: 171411 - DNA, 15 bp, Homo sapiens
ggataccccattaaa

SEQ ID NO: 171412 - DNA, 15 bp, Homo sapiens
gataccccattaaat

SEQ ID NO: 171413 - DNA, 15 bp, Homo sapiens
ataccccattaaatc

SEQ ID NO: 171414 - DNA, 15 bp, Homo sapiens
taccccattaaatct

SEQ ID NO: 171415 - DNA, 15 bp, Homo sapiens
accccattaaatctg

SEQ ID NO: 171416 - DNA, 15 bp, Homo sapiens
ccccattaaatctga

SEQ ID NO: 171417 - DNA, 15 bp, Homo sapiens
cccattaaatctgac

SEQ ID NO: 171418 - DNA, 15 bp, Homo sapiens
ccattaaatctgaca

SEQ ID NO: 171419 - DNA, 15 bp, Homo sapiens
cattaaatctgacag

SEQ ID NO: 171420 - DNA, 15 bp, Homo sapiens
attaaatctgacagt

SEQ ID NO: 171421 - DNA, 15 bp, Homo sapiens
ttaaatctgacagtc

SEQ ID NO: 171422 - DNA, 15 bp, Homo sapiens
taaatctgacagtct

SEQ ID NO: 171423 - DNA, 15 bp, Homo sapiens
aaatctgacagtctc

SEQ ID NO: 171424 - DNA, 15 bp, Homo sapiens
aatctgacagtctca

SEQ ID NO: 171425 - DNA, 15 bp, Homo sapiens
atctgacagtctcaa

SEQ ID NO: 171426 - DNA, 15 bp, Homo sapiens
tctgacagtctcaaa

SEQ ID NO: 171427 - DNA, 15 bp, Homo sapiens
ctgacagtctcaaat

SEQ ID NO: 171428 - DNA, 15 bp, Homo sapiens
tgacagtctcaaatt

SEQ ID NO: 171429 - DNA, 15 bp, Homo sapiens
gacagtctcaaattt

SEQ ID NO: 171430 - DNA, 15 bp, Homo sapiens
acagtctcaaatttt

SEQ ID NO: 171431 - DNA, 15 bp, Homo sapiens
cagtctcaaattttt

SEQ ID NO: 171432 - DNA, 15 bp, Homo sapiens
agtctcaaatttttc

SEQ ID NO: 171433 - DNA, 15 bp, Homo sapiens
gtctcaaatttttca

SEQ ID NO: 171434 - DNA, 15 bp, Homo sapiens
tctcaaatttttcat

SEQ ID NO: 171435 - DNA, 15 bp, Homo sapiens
ctcaaatttttcatc

SEQ ID NO: 171436 - DNA, 15 bp, Homo sapiens
tcaaatttttcatct

SEQ ID NO: 171437 - DNA, 15 bp, Homo sapiens
caaatttttcatctc

SEQ ID NO: 171438 - DNA, 15 bp, Homo sapiens
aaatttttcatctct

SEQ ID NO: 171439 - DNA, 15 bp, Homo sapiens
aatttttcatctctt

SEQ ID NO: 171440 - DNA, 15 bp, Homo sapiens
atttttcatctcttc

SEQ ID NO: 171441 - DNA, 15 bp, Homo sapiens
tttttcatctcttca

SEQ ID NO: 171442 - DNA, 15 bp, Homo sapiens
ttttcatctcttcaa

SEQ ID NO: 171443 - DNA, 15 bp, Homo sapiens
tttcatctcttcaat

SEQ ID NO: 171444 - DNA, 15 bp, Homo sapiens
ttcatctcttcaatc

SEQ ID NO: 171445 - DNA, 15 bp, Homo sapiens
tcatctcttcaatca

SEQ ID NO: 171446 - DNA, 15 bp, Homo sapiens
catctcttcaatcac

SEQ ID NO: 171447 - DNA, 15 bp, Homo sapiens
atctcttcaatcact

SEQ ID NO: 171448 - DNA, 15 bp, Homo sapiens
tctcttcaatcacta

SEQ ID NO: 171449 - DNA, 15 bp, Homo sapiens
ctcttcaatcactag

SEQ ID NO: 171450 - DNA, 15 bp, Homo sapiens
tcttcaatcactagt

SEQ ID NO: 171451 - DNA, 15 bp, Homo sapiens
cttcaatcactagtc

SEQ ID NO: 171452 - DNA, 15 bp, Homo sapiens
ttcaatcactagtca

SEQ ID NO: 171453 - DNA, 15 bp, Homo sapiens
tcaatcactagtcaa

SEQ ID NO: 171454 - DNA, 15 bp, Homo sapiens
caatcactagtcaag

SEQ ID NO: 171455 - DNA, 15 bp, Homo sapiens
aatcactagtcaaga

SEQ ID NO: 171456 - DNA, 15 bp, Homo sapiens
atcactagtcaagaa

SEQ ID NO: 171457 - DNA, 15 bp, Homo sapiens
tcactagtcaagaaa

SEQ ID NO: 171458 - DNA, 15 bp, Homo sapiens
cactagtcaagaaaa

SEQ ID NO: 171459 - DNA, 15 bp, Homo sapiens
actagtcaagaaaaa

SEQ ID NO: 171460 - DNA, 15 bp, Homo sapiens
ctagtcaagaaaaat

SEQ ID NO: 171461 - DNA, 15 bp, Homo sapiens
tagtcaagaaaaata

SEQ ID NO: 171462 - DNA, 15 bp, Homo sapiens
agtcaagaaaaatat

SEQ ID NO: 171463 - DNA, 15 bp, Homo sapiens
gtcaagaaaaatata

SEQ ID NO: 171464 - DNA, 15 bp, Homo sapiens
tcaagaaaaatataa

SEQ ID NO: 171465 - DNA, 15 bp, Homo sapiens
caagaaaaatataaa

SEQ ID NO: 171466 - DNA, 15 bp, Homo sapiens
aagaaaaatataaaa

SEQ ID NO: 171467 - DNA, 15 bp, Homo sapiens
agaaaaatataaaaa

SEQ ID NO: 171468 - DNA, 15 bp, Homo sapiens
gaaaaatataaaaac

SEQ ID NO: 171469 - DNA, 15 bp, Homo sapiens
aaaaatataaaaaca

SEQ ID NO: 171470 - DNA, 15 bp, Homo sapiens
aaaatataaaaacaa

SEQ ID NO: 171471 - DNA, 15 bp, Homo sapiens
aaatataaaaacaac

SEQ ID NO: 171472 - DNA, 15 bp, Homo sapiens
aatataaaaacaaca

SEQ ID NO: 171473 - DNA, 15 bp, Homo sapiens
atataaaaacaacaa

SEQ ID NO: 171474 - DNA, 15 bp, Homo sapiens
tataaaaacaacaaa

SEQ ID NO: 171475 - DNA, 15 bp, Homo sapiens
ataaaaacaacaaat

SEQ ID NO: 171476 - DNA, 15 bp, Homo sapiens
taaaaacaacaaata

SEQ ID NO: 171477 - DNA, 15 bp, Homo sapiens
aaaaacaacaaatac

SEQ ID NO: 171478 - DNA, 15 bp, Homo sapiens
aaaacaacaaatact

SEQ ID NO: 171479 - DNA, 15 bp, Homo sapiens
aaacaacaaatactt

SEQ ID NO: 171480 - DNA, 15 bp, Homo sapiens
aacaacaaatacttc

SEQ ID NO: 171481 - DNA, 15 bp, Homo sapiens
acaacaaatacttcc

SEQ ID NO: 171482 - DNA, 15 bp, Homo sapiens
caacaaatacttcca

SEQ ID NO: 171483 - DNA, 15 bp, Homo sapiens
aacaaatacttccat

SEQ ID NO: 171484 - DNA, 15 bp, Homo sapiens
acaaatacttccata

SEQ ID NO: 171485 - DNA, 15 bp, Homo sapiens
caaatacttccatat

SEQ ID NO: 171486 - DNA, 15 bp, Homo sapiens
aaatacttccatatg

SEQ ID NO: 171487 - DNA, 15 bp, Homo sapiens
aatacttccatatgg

SEQ ID NO: 171488 - DNA, 15 bp, Homo sapiens
atacttccatatgga

SEQ ID NO: 171489 - DNA, 15 bp, Homo sapiens
tacttccatatggag

SEQ ID NO: 171490 - DNA, 15 bp, Homo sapiens
acttccatatggagc

SEQ ID NO: 171491 - DNA, 15 bp, Homo sapiens
cttccatatggagca

SEQ ID NO: 171492 - DNA, 15 bp, Homo sapiens
ttccatatggagcat

SEQ ID NO: 171493 - DNA, 15 bp, Homo sapiens
tccatatggagcatt

SEQ ID NO: 171494 - DNA, 15 bp, Homo sapiens
ccatatggagcattt

SEQ ID NO: 171495 - DNA, 15 bp, Homo sapiens
catatggagcatttt

SEQ ID NO: 171496 - DNA, 15 bp, Homo sapiens
atatggagcattttt

SEQ ID NO: 171497 - DNA, 15 bp, Homo sapiens
tatggagcatttttc

SEQ ID NO: 171498 - DNA, 15 bp, Homo sapiens
atggagcatttttca

SEQ ID NO: 171499 - DNA, 15 bp, Homo sapiens
tggagcatttttcag

SEQ ID NO: 171500 - DNA, 15 bp, Homo sapiens
ggagcatttttcaga

SEQ ID NO: 171501 - DNA, 15 bp, Homo sapiens
gagcatttttcagag

SEQ ID NO: 171502 - DNA, 15 bp, Homo sapiens
agcatttttcagagt

SEQ ID NO: 171503 - DNA, 15 bp, Homo sapiens
gcatttttcagagtt

SEQ ID NO: 171504 - DNA, 15 bp, Homo sapiens
catttttcagagttt

SEQ ID NO: 171505 - DNA, 15 bp, Homo sapiens
atttttcagagtttt

SEQ ID NO: 171506 - DNA, 15 bp, Homo sapiens
tttttcagagttttc

SEQ ID NO: 171507 - DNA, 15 bp, Homo sapiens
ttttcagagttttct

SEQ ID NO: 171508 - DNA, 15 bp, Homo sapiens
tttcagagttttcta

SEQ ID NO: 171509 - DNA, 15 bp, Homo sapiens
ttcagagttttctaa

SEQ ID NO: 171510 - DNA, 15 bp, Homo sapiens
tcagagttttctaac

SEQ ID NO: 171511 - DNA, 15 bp, Homo sapiens
cagagttttctaacc

SEQ ID NO: 171512 - DNA, 15 bp, Homo sapiens
agagttttctaaccc

SEQ ID NO: 171513 - DNA, 15 bp, Homo sapiens
gagttttctaaccca

SEQ ID NO: 171514 - DNA, 15 bp, Homo sapiens
agttttctaacccag

SEQ ID NO: 171515 - DNA, 15 bp, Homo sapiens
gttttctaacccagt

SEQ ID NO: 171516 - DNA, 15 bp, Homo sapiens
ttttctaacccagtc

SEQ ID NO: 171517 - DNA, 15 bp, Homo sapiens
tttctaacccagtct

SEQ ID NO: 171518 - DNA, 15 bp, Homo sapiens
ttctaacccagtctt

SEQ ID NO: 171519 - DNA, 15 bp, Homo sapiens
tctaacccagtctta

SEQ ID NO: 171520 - DNA, 15 bp, Homo sapiens
ctaacccagtcttat

SEQ ID NO: 171521 - DNA, 15 bp, Homo sapiens
taacccagtcttatt

SEQ ID NO: 171522 - DNA, 15 bp, Homo sapiens
aacccagtcttattt

SEQ ID NO: 171523 - DNA, 15 bp, Homo sapiens
acccagtcttatttt

SEQ ID NO: 171524 - DNA, 15 bp, Homo sapiens
cccagtcttattttt

SEQ ID NO: 171525 - DNA, 15 bp, Homo sapiens
ccagtcttatttttc

SEQ ID NO: 171526 - DNA, 15 bp, Homo sapiens
cagtcttatttttct

SEQ ID NO: 171527 - DNA, 15 bp, Homo sapiens
agtcttatttttcta

SEQ ID NO: 171528 - DNA, 15 bp, Homo sapiens
gtcttatttttctag

SEQ ID NO: 171529 - DNA, 15 bp, Homo sapiens
tcttatttttctagt

SEQ ID NO: 171530 - DNA, 15 bp, Homo sapiens
cttatttttctagtc

SEQ ID NO: 171531 - DNA, 15 bp, Homo sapiens
ttatttttctagtca

SEQ ID NO: 171532 - DNA, 15 bp, Homo sapiens
tatttttctagtcag

SEQ ID NO: 171533 - DNA, 15 bp, Homo sapiens
atttttctagtcagt

SEQ ID NO: 171534 - DNA, 15 bp, Homo sapiens
tttttctagtcagta

SEQ ID NO: 171535 - DNA, 15 bp, Homo sapiens
ttttctagtcagtaa

SEQ ID NO: 171536 - DNA, 15 bp, Homo sapiens
tttctagtcagtaaa

SEQ ID NO: 171537 - DNA, 15 bp, Homo sapiens
ttctagtcagtaaac

SEQ ID NO: 171538 - DNA, 15 bp, Homo sapiens
tctagtcagtaaaca

SEQ ID NO: 171539 - DNA, 15 bp, Homo sapiens
ctagtcagtaaacat

SEQ ID NO: 171540 - DNA, 15 bp, Homo sapiens
tagtcagtaaacatt

SEQ ID NO: 171541 - DNA, 15 bp, Homo sapiens
agtcagtaaacattt

SEQ ID NO: 171542 - DNA, 15 bp, Homo sapiens
gtcagtaaacatttg

SEQ ID NO: 171543 - DNA, 15 bp, Homo sapiens
tcagtaaacatttgt

SEQ ID NO: 171544 - DNA, 15 bp, Homo sapiens
cagtaaacatttgta

SEQ ID NO: 171545 - DNA, 15 bp, Homo sapiens
agtaaacatttgtaa

SEQ ID NO: 171546 - DNA, 15 bp, Homo sapiens
gtaaacatttgtaaa

SEQ ID NO: 171547 - DNA, 15 bp, Homo sapiens
taaacatttgtaaaa

SEQ ID NO: 171548 - DNA, 15 bp, Homo sapiens
aaacatttgtaaaaa

SEQ ID NO: 171549 - DNA, 15 bp, Homo sapiens
aacatttgtaaaaat

SEQ ID NO: 171550 - DNA, 15 bp, Homo sapiens
acatttgtaaaaata

SEQ ID NO: 171551 - DNA, 15 bp, Homo sapiens
catttgtaaaaatac

SEQ ID NO: 171552 - DNA, 15 bp, Homo sapiens
atttgtaaaaatact

SEQ ID NO: 171553 - DNA, 15 bp, Homo sapiens
tttgtaaaaatactg

SEQ ID NO: 171554 - DNA, 15 bp, Homo sapiens
ttgtaaaaatactgt

SEQ ID NO: 171555 - DNA, 15 bp, Homo sapiens
tgtaaaaatactgtt

SEQ ID NO: 171556 - DNA, 15 bp, Homo sapiens
gtaaaaatactgttt

SEQ ID NO: 171557 - DNA, 15 bp, Homo sapiens
taaaaatactgtttc

SEQ ID NO: 171558 - DNA, 15 bp, Homo sapiens
aaaaatactgtttca

SEQ ID NO: 171559 - DNA, 15 bp, Homo sapiens
aaaatactgtttcac

SEQ ID NO: 171560 - DNA, 15 bp, Homo sapiens
aaatactgtttcact

SEQ ID NO: 171561 - DNA, 15 bp, Homo sapiens
aatactgtttcacta

SEQ ID NO: 171562 - DNA, 15 bp, Homo sapiens
atactgtttcactaa

SEQ ID NO: 171563 - DNA, 15 bp, Homo sapiens
tactgtttcactaat

SEQ ID NO: 171564 - DNA, 15 bp, Homo sapiens
actgtttcactaata

SEQ ID NO: 171565 - DNA, 15 bp, Homo sapiens
ctgtttcactaatac

SEQ ID NO: 171566 - DNA, 15 bp, Homo sapiens
tgtttcactaatact

SEQ ID NO: 171567 - DNA, 15 bp, Homo sapiens
gtttcactaatactt

SEQ ID NO: 171568 - DNA, 15 bp, Homo sapiens
tttcactaatactta

SEQ ID NO: 171569 - DNA, 15 bp, Homo sapiens
ttcactaatacttac

SEQ ID NO: 171570 - DNA, 15 bp, Homo sapiens
tcactaatacttact

SEQ ID NO: 171571 - DNA, 15 bp, Homo sapiens
cactaatacttactg

SEQ ID NO: 171572 - DNA, 15 bp, Homo sapiens
actaatacttactgt

SEQ ID NO: 171573 - DNA, 15 bp, Homo sapiens
ctaatacttactgtt

SEQ ID NO: 171574 - DNA, 15 bp, Homo sapiens
taatacttactgtta

SEQ ID NO: 171575 - DNA, 15 bp, Homo sapiens
aatacttactgttaa

SEQ ID NO: 171576 - DNA, 15 bp, Homo sapiens
atacttactgttaac

SEQ ID NO: 171577 - DNA, 15 bp, Homo sapiens
tacttactgttaact

SEQ ID NO: 171578 - DNA, 15 bp, Homo sapiens
acttactgttaactg

SEQ ID NO: 171579 - DNA, 15 bp, Homo sapiens
cttactgttaactgt

SEQ ID NO: 171580 - DNA, 15 bp, Homo sapiens
ttactgttaactgtc

SEQ ID NO: 171581 - DNA, 15 bp, Homo sapiens
tactgttaactgtct

SEQ ID NO: 171582 - DNA, 15 bp, Homo sapiens
actgttaactgtctt

SEQ ID NO: 171583 - DNA, 15 bp, Homo sapiens
ctgttaactgtcttg

SEQ ID NO: 171584 - DNA, 15 bp, Homo sapiens
tgttaactgtcttga

SEQ ID NO: 171585 - DNA, 15 bp, Homo sapiens
gttaactgtcttgag

SEQ ID NO: 171586 - DNA, 15 bp, Homo sapiens
ttaactgtcttgaga

SEQ ID NO: 171587 - DNA, 15 bp, Homo sapiens
taactgtcttgagag

SEQ ID NO: 171588 - DNA, 15 bp, Homo sapiens
aactgtcttgagaga

SEQ ID NO: 171589 - DNA, 15 bp, Homo sapiens
actgtcttgagagaa

SEQ ID NO: 171590 - DNA, 15 bp, Homo sapiens
ctgtcttgagagaaa

SEQ ID NO: 171591 - DNA, 15 bp, Homo sapiens
tgtcttgagagaaaa

SEQ ID NO: 171592 - DNA, 15 bp, Homo sapiens
gtcttgagagaaaag

SEQ ID NO: 171593 - DNA, 15 bp, Homo sapiens
tcttgagagaaaaga

SEQ ID NO: 171594 - DNA, 15 bp, Homo sapiens
cttgagagaaaagaa

SEQ ID NO: 171595 - DNA, 15 bp, Homo sapiens
ttgagagaaaagaaa

SEQ ID NO: 171596 - DNA, 15 bp, Homo sapiens
tgagagaaaagaaaa

SEQ ID NO: 171597 - DNA, 15 bp, Homo sapiens
gagagaaaagaaaaa

SEQ ID NO: 171598 - DNA, 15 bp, Homo sapiens
agagaaaagaaaaat

SEQ ID NO: 171599 - DNA, 15 bp, Homo sapiens
gagaaaagaaaaata

SEQ ID NO: 171600 - DNA, 15 bp, Homo sapiens
agaaaagaaaaatat

SEQ ID NO: 171601 - DNA, 15 bp, Homo sapiens
gaaaagaaaaatatg

SEQ ID NO: 171602 - DNA, 15 bp, Homo sapiens
aaaagaaaaatatga

SEQ ID NO: 171603 - DNA, 15 bp, Homo sapiens
aaagaaaaatatgag

SEQ ID NO: 171604 - DNA, 15 bp, Homo sapiens
aagaaaaatatgaga

SEQ ID NO: 171605 - DNA, 15 bp, Homo sapiens
agaaaaatatgagag

SEQ ID NO: 171606 - DNA, 15 bp, Homo sapiens
gaaaaatatgagaga

SEQ ID NO: 171607 - DNA, 15 bp, Homo sapiens
aaaaatatgagagaa

SEQ ID NO: 171608 - DNA, 15 bp, Homo sapiens
aaaatatgagagaac

SEQ ID NO: 171609 - DNA, 15 bp, Homo sapiens
aaatatgagagaact

SEQ ID NO: 171610 - DNA, 15 bp, Homo sapiens
aatatgagagaacta

SEQ ID NO: 171611 - DNA, 15 bp, Homo sapiens
atatgagagaactat

SEQ ID NO: 171612 - DNA, 15 bp, Homo sapiens
tatgagagaactatt

SEQ ID NO: 171613 - DNA, 15 bp, Homo sapiens
atgagagaactattg

SEQ ID NO: 171614 - DNA, 15 bp, Homo sapiens
tgagagaactattgt

SEQ ID NO: 171615 - DNA, 15 bp, Homo sapiens
gagagaactattgtt

SEQ ID NO: 171616 - DNA, 15 bp, Homo sapiens
agagaactattgttt

SEQ ID NO: 171617 - DNA, 15 bp, Homo sapiens
gagaactattgtttg

SEQ ID NO: 171618 - DNA, 15 bp, Homo sapiens
agaactattgtttgg

SEQ ID NO: 171619 - DNA, 15 bp, Homo sapiens
gaactattgtttggg

SEQ ID NO: 171620 - DNA, 15 bp, Homo sapiens
aactattgtttgggg

SEQ ID NO: 171621 - DNA, 15 bp, Homo sapiens
actattgtttgggga

SEQ ID NO: 171622 - DNA, 15 bp, Homo sapiens
ctattgtttggggaa

SEQ ID NO: 171623 - DNA, 15 bp, Homo sapiens
tattgtttggggaag

SEQ ID NO: 171624 - DNA, 15 bp, Homo sapiens
attgtttggggaagt

SEQ ID NO: 171625 - DNA, 15 bp, Homo sapiens
ttgtttggggaagtt

SEQ ID NO: 171626 - DNA, 15 bp, Homo sapiens
tgtttggggaagttc

SEQ ID NO: 171627 - DNA, 15 bp, Homo sapiens
gtttggggaagttca

SEQ ID NO: 171628 - DNA, 15 bp, Homo sapiens
tttggggaagttcaa

SEQ ID NO: 171629 - DNA, 15 bp, Homo sapiens
ttggggaagttcaag

SEQ ID NO: 171630 - DNA, 15 bp, Homo sapiens
tggggaagttcaagt

SEQ ID NO: 171631 - DNA, 15 bp, Homo sapiens
ggggaagttcaagtg

SEQ ID NO: 171632 - DNA, 15 bp, Homo sapiens
gggaagttcaagtga

SEQ ID NO: 171633 - DNA, 15 bp, Homo sapiens
ggaagttcaagtgat

SEQ ID NO: 171634 - DNA, 15 bp, Homo sapiens
gaagttcaagtgatc

SEQ ID NO: 171635 - DNA, 15 bp, Homo sapiens
aagttcaagtgatct

SEQ ID NO: 171636 - DNA, 15 bp, Homo sapiens
agttcaagtgatctt

SEQ ID NO: 171637 - DNA, 15 bp, Homo sapiens
gttcaagtgatcttt

SEQ ID NO: 171638 - DNA, 15 bp, Homo sapiens
ttcaagtgatctttc

SEQ ID NO: 171639 - DNA, 15 bp, Homo sapiens
tcaagtgatctttca

SEQ ID NO: 171640 - DNA, 15 bp, Homo sapiens
caagtgatctttcaa

SEQ ID NO: 171641 - DNA, 15 bp, Homo sapiens
aagtgatctttcaat

SEQ ID NO: 171642 - DNA, 15 bp, Homo sapiens
agtgatctttcaata

SEQ ID NO: 171643 - DNA, 15 bp, Homo sapiens
gtgatctttcaatat

SEQ ID NO: 171644 - DNA, 15 bp, Homo sapiens
tgatctttcaatatc

SEQ ID NO: 171645 - DNA, 15 bp, Homo sapiens
gatctttcaatatca

SEQ ID NO: 171646 - DNA, 15 bp, Homo sapiens
atctttcaatatcat

SEQ ID NO: 171647 - DNA, 15 bp, Homo sapiens
tctttcaatatcatt

SEQ ID NO: 171648 - DNA, 15 bp, Homo sapiens
ctttcaatatcatta

SEQ ID NO: 171649 - DNA, 15 bp, Homo sapiens
tttcaatatcattac

SEQ ID NO: 171650 - DNA, 15 bp, Homo sapiens
ttcaatatcattact

SEQ ID NO: 171651 - DNA, 15 bp, Homo sapiens
tcaatatcattacta

SEQ ID NO: 171652 - DNA, 15 bp, Homo sapiens
caatatcattactaa

SEQ ID NO: 171653 - DNA, 15 bp, Homo sapiens
aatatcattactaac

SEQ ID NO: 171654 - DNA, 15 bp, Homo sapiens
atatcattactaact

SEQ ID NO: 171655 - DNA, 15 bp, Homo sapiens
tatcattactaactt

SEQ ID NO: 171656 - DNA, 15 bp, Homo sapiens
atcattactaacttc

SEQ ID NO: 171657 - DNA, 15 bp, Homo sapiens
tcattactaacttct

SEQ ID NO: 171658 - DNA, 15 bp, Homo sapiens
cattactaacttctt

SEQ ID NO: 171659 - DNA, 15 bp, Homo sapiens
attactaacttcttc

SEQ ID NO: 171660 - DNA, 15 bp, Homo sapiens
ttactaacttcttcc

SEQ ID NO: 171661 - DNA, 15 bp, Homo sapiens
tactaacttcttcca

SEQ ID NO: 171662 - DNA, 15 bp, Homo sapiens
actaacttcttccac

SEQ ID NO: 171663 - DNA, 15 bp, Homo sapiens
ctaacttcttccact

SEQ ID NO: 171664 - DNA, 15 bp, Homo sapiens
taacttcttccactt

SEQ ID NO: 171665 - DNA, 15 bp, Homo sapiens
aacttcttccacttt

SEQ ID NO: 171666 - DNA, 15 bp, Homo sapiens
acttcttccactttt

SEQ ID NO: 171667 - DNA, 15 bp, Homo sapiens
cttcttccacttttt

SEQ ID NO: 171668 - DNA, 15 bp, Homo sapiens
ttcttccactttttc

SEQ ID NO: 171669 - DNA, 15 bp, Homo sapiens
tcttccactttttcc

SEQ ID NO: 171670 - DNA, 15 bp, Homo sapiens
cttccactttttcca

SEQ ID NO: 171671 - DNA, 15 bp, Homo sapiens
ttccactttttccag

SEQ ID NO: 171672 - DNA, 15 bp, Homo sapiens
tccactttttccaga

SEQ ID NO: 171673 - DNA, 15 bp, Homo sapiens
ccactttttccagaa

SEQ ID NO: 171674 - DNA, 15 bp, Homo sapiens
cactttttccagaat

SEQ ID NO: 171675 - DNA, 15 bp, Homo sapiens
actttttccagaatt

SEQ ID NO: 171676 - DNA, 15 bp, Homo sapiens
ctttttccagaattt

SEQ ID NO: 171677 - DNA, 15 bp, Homo sapiens
tttttccagaatttg

SEQ ID NO: 171678 - DNA, 15 bp, Homo sapiens
ttttccagaatttga

SEQ ID NO: 171679 - DNA, 15 bp, Homo sapiens
tttccagaatttgaa

SEQ ID NO: 171680 - DNA, 15 bp, Homo sapiens
ttccagaatttgaat

SEQ ID NO: 171681 - DNA, 15 bp, Homo sapiens
tccagaatttgaata

SEQ ID NO: 171682 - DNA, 15 bp, Homo sapiens
ccagaatttgaatat

SEQ ID NO: 171683 - DNA, 15 bp, Homo sapiens
cagaatttgaatatt

SEQ ID NO: 171684 - DNA, 15 bp, Homo sapiens
agaatttgaatatta

SEQ ID NO: 171685 - DNA, 15 bp, Homo sapiens
gaatttgaatattaa

SEQ ID NO: 171686 - DNA, 15 bp, Homo sapiens
aatttgaatattaac

SEQ ID NO: 171687 - DNA, 15 bp, Homo sapiens
atttgaatattaacg

SEQ ID NO: 171688 - DNA, 15 bp, Homo sapiens
tttgaatattaacgc

SEQ ID NO: 171689 - DNA, 15 bp, Homo sapiens
ttgaatattaacgct

SEQ ID NO: 171690 - DNA, 15 bp, Homo sapiens
tgaatattaacgcta

SEQ ID NO: 171691 - DNA, 15 bp, Homo sapiens
gaatattaacgctaa

SEQ ID NO: 171692 - DNA, 15 bp, Homo sapiens
aatattaacgctaaa

SEQ ID NO: 171693 - DNA, 15 bp, Homo sapiens
atattaacgctaaag

SEQ ID NO: 171694 - DNA, 15 bp, Homo sapiens
tattaacgctaaagg

SEQ ID NO: 171695 - DNA, 15 bp, Homo sapiens
attaacgctaaaggt

SEQ ID NO: 171696 - DNA, 15 bp, Homo sapiens
ttaacgctaaaggtg

SEQ ID NO: 171697 - DNA, 15 bp, Homo sapiens
taacgctaaaggtgt

SEQ ID NO: 171698 - DNA, 15 bp, Homo sapiens
aacgctaaaggtgta

SEQ ID NO: 171699 - DNA, 15 bp, Homo sapiens
acgctaaaggtgtaa

SEQ ID NO: 171700 - DNA, 15 bp, Homo sapiens
cgctaaaggtgtaag

SEQ ID NO: 171701 - DNA, 15 bp, Homo sapiens
gctaaaggtgtaaga

SEQ ID NO: 171702 - DNA, 15 bp, Homo sapiens
ctaaaggtgtaagac

SEQ ID NO: 171703 - DNA, 15 bp, Homo sapiens
taaaggtgtaagact

SEQ ID NO: 171704 - DNA, 15 bp, Homo sapiens
aaaggtgtaagactt

SEQ ID NO: 171705 - DNA, 15 bp, Homo sapiens
aaggtgtaagacttc

SEQ ID NO: 171706 - DNA, 15 bp, Homo sapiens
aggtgtaagacttca

SEQ ID NO: 171707 - DNA, 15 bp, Homo sapiens
ggtgtaagacttcag

SEQ ID NO: 171708 - DNA, 15 bp, Homo sapiens
gtgtaagacttcaga

SEQ ID NO: 171709 - DNA, 15 bp, Homo sapiens
tgtaagacttcagat

SEQ ID NO: 171710 - DNA, 15 bp, Homo sapiens
gtaagacttcagatt

SEQ ID NO: 171711 - DNA, 15 bp, Homo sapiens
taagacttcagattt

SEQ ID NO: 171712 - DNA, 15 bp, Homo sapiens
aagacttcagatttc

SEQ ID NO: 171713 - DNA, 15 bp, Homo sapiens
agacttcagatttca

SEQ ID NO: 171714 - DNA, 15 bp, Homo sapiens
gacttcagatttcaa

SEQ ID NO: 171715 - DNA, 15 bp, Homo sapiens
acttcagatttcaaa

SEQ ID NO: 171716 - DNA, 15 bp, Homo sapiens
cttcagatttcaaat

SEQ ID NO: 171717 - DNA, 15 bp, Homo sapiens
ttcagatttcaaatt

SEQ ID NO: 171718 - DNA, 15 bp, Homo sapiens
tcagatttcaaatta

SEQ ID NO: 171719 - DNA, 15 bp, Homo sapiens
cagatttcaaattaa

SEQ ID NO: 171720 - DNA, 15 bp, Homo sapiens
agatttcaaattaat

SEQ ID NO: 171721 - DNA, 15 bp, Homo sapiens
gatttcaaattaatc

SEQ ID NO: 171722 - DNA, 15 bp, Homo sapiens
atttcaaattaatct

SEQ ID NO: 171723 - DNA, 15 bp, Homo sapiens
tttcaaattaatctt

SEQ ID NO: 171724 - DNA, 15 bp, Homo sapiens
ttcaaattaatcttt

SEQ ID NO: 171725 - DNA, 15 bp, Homo sapiens
tcaaattaatctttc

SEQ ID NO: 171726 - DNA, 15 bp, Homo sapiens
caaattaatctttct

SEQ ID NO: 171727 - DNA, 15 bp, Homo sapiens
aaattaatctttcta

SEQ ID NO: 171728 - DNA, 15 bp, Homo sapiens
aattaatctttctat

SEQ ID NO: 171729 - DNA, 15 bp, Homo sapiens
attaatctttctata

SEQ ID NO: 171730 - DNA, 15 bp, Homo sapiens
ttaatctttctatat

SEQ ID NO: 171731 - DNA, 15 bp, Homo sapiens
taatctttctatatt

SEQ ID NO: 171732 - DNA, 15 bp, Homo sapiens
aatctttctatattt

SEQ ID NO: 171733 - DNA, 15 bp, Homo sapiens
atctttctatatttt

SEQ ID NO: 171734 - DNA, 15 bp, Homo sapiens
tctttctatattttt

SEQ ID NO: 171735 - DNA, 15 bp, Homo sapiens
ctttctatatttttt

SEQ ID NO: 171736 - DNA, 15 bp, Homo sapiens
tttctatatttttta

SEQ ID NO: 171737 - DNA, 15 bp, Homo sapiens
ttctatattttttaa

SEQ ID NO: 171738 - DNA, 15 bp, Homo sapiens
tctatattttttaaa

SEQ ID NO: 171739 - DNA, 15 bp, Homo sapiens
ctatattttttaaat

SEQ ID NO: 171740 - DNA, 15 bp, Homo sapiens
atattttttaaattt

SEQ ID NO: 171741 - DNA, 15 bp, Homo sapiens
tattttttaaattta

SEQ ID NO: 171742 - DNA, 15 bp, Homo sapiens
attttttaaatttac

SEQ ID NO: 171743 - DNA, 15 bp, Homo sapiens
ttttttaaatttaca

SEQ ID NO: 171744 - DNA, 15 bp, Homo sapiens
ttttaaatttacaga

SEQ ID NO: 171745 - DNA, 15 bp, Homo sapiens
tttaaatttacagaa

SEQ ID NO: 171746 - DNA, 15 bp, Homo sapiens
ttaaatttacagaat

SEQ ID NO: 171747 - DNA, 15 bp, Homo sapiens
taaatttacagaata

SEQ ID NO: 171748 - DNA, 15 bp, Homo sapiens
aaatttacagaatat

SEQ ID NO: 171749 - DNA, 15 bp, Homo sapiens
aatttacagaatatt

SEQ ID NO: 171750 - DNA, 15 bp, Homo sapiens
atttacagaatatta

SEQ ID NO: 171751 - DNA, 15 bp, Homo sapiens
tttacagaatattat

SEQ ID NO: 171752 - DNA, 15 bp, Homo sapiens
ttacagaatattata

SEQ ID NO: 171753 - DNA, 15 bp, Homo sapiens
tacagaatattatat

SEQ ID NO: 171754 - DNA, 15 bp, Homo sapiens
acagaatattatata

SEQ ID NO: 171755 - DNA, 15 bp, Homo sapiens
cagaatattatataa

SEQ ID NO: 171756 - DNA, 15 bp, Homo sapiens
agaatattatataac

SEQ ID NO: 171757 - DNA, 15 bp, Homo sapiens
gaatattatataacc

SEQ ID NO: 171758 - DNA, 15 bp, Homo sapiens
aatattatataaccc

SEQ ID NO: 171759 - DNA, 15 bp, Homo sapiens
atattatataaccca

SEQ ID NO: 171760 - DNA, 15 bp, Homo sapiens
tattatataacccac

SEQ ID NO: 171761 - DNA, 15 bp, Homo sapiens
attatataacccact

SEQ ID NO: 171762 - DNA, 15 bp, Homo sapiens
ttatataacccactg

SEQ ID NO: 171763 - DNA, 15 bp, Homo sapiens
tatataacccactgc

SEQ ID NO: 171764 - DNA, 15 bp, Homo sapiens
atataacccactgct

SEQ ID NO: 171765 - DNA, 15 bp, Homo sapiens
tataacccactgctg

SEQ ID NO: 171766 - DNA, 15 bp, Homo sapiens
ataacccactgctga

SEQ ID NO: 171767 - DNA, 15 bp, Homo sapiens
taacccactgctgaa

SEQ ID NO: 171768 - DNA, 15 bp, Homo sapiens
aacccactgctgaaa

SEQ ID NO: 171769 - DNA, 15 bp, Homo sapiens
acccactgctgaaaa

SEQ ID NO: 171770 - DNA, 15 bp, Homo sapiens
cccactgctgaaaaa

SEQ ID NO: 171771 - DNA, 15 bp, Homo sapiens
ccactgctgaaaaag

SEQ ID NO: 171772 - DNA, 15 bp, Homo sapiens
cactgctgaaaaaga

SEQ ID NO: 171773 - DNA, 15 bp, Homo sapiens
actgctgaaaaagaa

SEQ ID NO: 171774 - DNA, 15 bp, Homo sapiens
ctgctgaaaaagaaa

SEQ ID NO: 171775 - DNA, 15 bp, Homo sapiens
tgctgaaaaagaaaa

SEQ ID NO: 171776 - DNA, 15 bp, Homo sapiens
gctgaaaaagaaaaa

SEQ ID NO: 171777 - DNA, 15 bp, Homo sapiens
ctgaaaaagaaaaaa

SEQ ID NO: 171778 - DNA, 15 bp, Homo sapiens
tgaaaaagaaaaaaa

SEQ ID NO: 171779 - DNA, 15 bp, Homo sapiens
gaaaaagaaaaaaat

SEQ ID NO: 171780 - DNA, 15 bp, Homo sapiens
aaaaagaaaaaaatg

SEQ ID NO: 171781 - DNA, 15 bp, Homo sapiens
aaaagaaaaaaatga

SEQ ID NO: 171782 - DNA, 15 bp, Homo sapiens
aaagaaaaaaatgat

SEQ ID NO: 171783 - DNA, 15 bp, Homo sapiens
aagaaaaaaatgatt

SEQ ID NO: 171784 - DNA, 15 bp, Homo sapiens
agaaaaaaatgattg

SEQ ID NO: 171785 - DNA, 15 bp, Homo sapiens
gaaaaaaatgattgt

SEQ ID NO: 171786 - DNA, 15 bp, Homo sapiens
aaaaaaatgattgtt

SEQ ID NO: 171787 - DNA, 15 bp, Homo sapiens
aaaaaatgattgttt

SEQ ID NO: 171788 - DNA, 15 bp, Homo sapiens
aaaaatgattgtttt

SEQ ID NO: 171789 - DNA, 15 bp, Homo sapiens
aaaatgattgtttta

SEQ ID NO: 171790 - DNA, 15 bp, Homo sapiens
aaatgattgttttag

SEQ ID NO: 171791 - DNA, 15 bp, Homo sapiens
aatgattgttttaga

SEQ ID NO: 171792 - DNA, 15 bp, Homo sapiens
atgattgttttagaa

SEQ ID NO: 171793 - DNA, 15 bp, Homo sapiens
tgattgttttagaag

SEQ ID NO: 171794 - DNA, 15 bp, Homo sapiens
gattgttttagaagt

SEQ ID NO: 171795 - DNA, 15 bp, Homo sapiens
attgttttagaagtt

SEQ ID NO: 171796 - DNA, 15 bp, Homo sapiens
ttgttttagaagtta

SEQ ID NO: 171797 - DNA, 15 bp, Homo sapiens
tgttttagaagttaa

SEQ ID NO: 171798 - DNA, 15 bp, Homo sapiens
gttttagaagttaaa

SEQ ID NO: 171799 - DNA, 15 bp, Homo sapiens
ttttagaagttaaag

SEQ ID NO: 171800 - DNA, 15 bp, Homo sapiens
tttagaagttaaagt

SEQ ID NO: 171801 - DNA, 15 bp, Homo sapiens
ttagaagttaaagtc

SEQ ID NO: 171802 - DNA, 15 bp, Homo sapiens
tagaagttaaagtca

SEQ ID NO: 171803 - DNA, 15 bp, Homo sapiens
agaagttaaagtcaa

SEQ ID NO: 171804 - DNA, 15 bp, Homo sapiens
gaagttaaagtcaat

SEQ ID NO: 171805 - DNA, 15 bp, Homo sapiens
aagttaaagtcaata

SEQ ID NO: 171806 - DNA, 15 bp, Homo sapiens
agttaaagtcaatat

SEQ ID NO: 171807 - DNA, 15 bp, Homo sapiens
gttaaagtcaatatt

SEQ ID NO: 171808 - DNA, 15 bp, Homo sapiens
ttaaagtcaatattg

SEQ ID NO: 171809 - DNA, 15 bp, Homo sapiens
taaagtcaatattga

SEQ ID NO: 171810 - DNA, 15 bp, Homo sapiens
aaagtcaatattgat

SEQ ID NO: 171811 - DNA, 15 bp, Homo sapiens
aagtcaatattgatt

SEQ ID NO: 171812 - DNA, 15 bp, Homo sapiens
agtcaatattgattt

SEQ ID NO: 171813 - DNA, 15 bp, Homo sapiens
gtcaatattgatttt

SEQ ID NO: 171814 - DNA, 15 bp, Homo sapiens
tcaatattgatttta

SEQ ID NO: 171815 - DNA, 15 bp, Homo sapiens
caatattgattttaa

SEQ ID NO: 171816 - DNA, 15 bp, Homo sapiens
aatattgattttaaa

SEQ ID NO: 171817 - DNA, 15 bp, Homo sapiens
atattgattttaaat

SEQ ID NO: 171818 - DNA, 15 bp, Homo sapiens
tattgattttaaata

SEQ ID NO: 171819 - DNA, 15 bp, Homo sapiens
attgattttaaatat

SEQ ID NO: 171820 - DNA, 15 bp, Homo sapiens
ttgattttaaatata

SEQ ID NO: 171821 - DNA, 15 bp, Homo sapiens
tgattttaaatataa

SEQ ID NO: 171822 - DNA, 15 bp, Homo sapiens
gattttaaatataag

SEQ ID NO: 171823 - DNA, 15 bp, Homo sapiens
attttaaatataagt

SEQ ID NO: 171824 - DNA, 15 bp, Homo sapiens
ttttaaatataagta

SEQ ID NO: 171825 - DNA, 15 bp, Homo sapiens
tttaaatataagtaa

SEQ ID NO: 171826 - DNA, 15 bp, Homo sapiens
ttaaatataagtaat

SEQ ID NO: 171827 - DNA, 15 bp, Homo sapiens
taaatataagtaatg

SEQ ID NO: 171828 - DNA, 15 bp, Homo sapiens
aaatataagtaatga

SEQ ID NO: 171829 - DNA, 15 bp, Homo sapiens
aatataagtaatgaa

SEQ ID NO: 171830 - DNA, 15 bp, Homo sapiens
atataagtaatgaag

SEQ ID NO: 171831 - DNA, 15 bp, Homo sapiens
tataagtaatgaagg

SEQ ID NO: 171832 - DNA, 15 bp, Homo sapiens
ataagtaatgaaggc

SEQ ID NO: 171833 - DNA, 15 bp, Homo sapiens
taagtaatgaaggca

SEQ ID NO: 171834 - DNA, 15 bp, Homo sapiens
aagtaatgaaggcat

SEQ ID NO: 171835 - DNA, 15 bp, Homo sapiens
agtaatgaaggcata

SEQ ID NO: 171836 - DNA, 15 bp, Homo sapiens
gtaatgaaggcatat

SEQ ID NO: 171837 - DNA, 15 bp, Homo sapiens
taatgaaggcatatt

SEQ ID NO: 171838 - DNA, 15 bp, Homo sapiens
aatgaaggcatattt

SEQ ID NO: 171839 - DNA, 15 bp, Homo sapiens
atgaaggcatatttc

SEQ ID NO: 171840 - DNA, 15 bp, Homo sapiens
tgaaggcatatttcc

SEQ ID NO: 171841 - DNA, 15 bp, Homo sapiens
gaaggcatatttcca

SEQ ID NO: 171842 - DNA, 15 bp, Homo sapiens
aaggcatatttccaa

SEQ ID NO: 171843 - DNA, 15 bp, Homo sapiens
aggcatatttccaat

SEQ ID NO: 171844 - DNA, 15 bp, Homo sapiens
ggcatatttccaata

SEQ ID NO: 171845 - DNA, 15 bp, Homo sapiens
gcatatttccaataa

SEQ ID NO: 171846 - DNA, 15 bp, Homo sapiens
catatttccaataac

SEQ ID NO: 171847 - DNA, 15 bp, Homo sapiens
atatttccaataact

SEQ ID NO: 171848 - DNA, 15 bp, Homo sapiens
tatttccaataacta

SEQ ID NO: 171849 - DNA, 15 bp, Homo sapiens
atttccaataactag

SEQ ID NO: 171850 - DNA, 15 bp, Homo sapiens
tttccaataactagt

SEQ ID NO: 171851 - DNA, 15 bp, Homo sapiens
ttccaataactagtg

SEQ ID NO: 171852 - DNA, 15 bp, Homo sapiens
tccaataactagtga

SEQ ID NO: 171853 - DNA, 15 bp, Homo sapiens
ccaataactagtgat

SEQ ID NO: 171854 - DNA, 15 bp, Homo sapiens
caataactagtgata

SEQ ID NO: 171855 - DNA, 15 bp, Homo sapiens
aataactagtgatat

SEQ ID NO: 171856 - DNA, 15 bp, Homo sapiens
ataactagtgatatg

SEQ ID NO: 171857 - DNA, 15 bp, Homo sapiens
taactagtgatatgg

SEQ ID NO: 171858 - DNA, 15 bp, Homo sapiens
aactagtgatatggc

SEQ ID NO: 171859 - DNA, 15 bp, Homo sapiens
actagtgatatggca

SEQ ID NO: 171860 - DNA, 15 bp, Homo sapiens
ctagtgatatggcat

SEQ ID NO: 171861 - DNA, 15 bp, Homo sapiens
tagtgatatggcatc

SEQ ID NO: 171862 - DNA, 15 bp, Homo sapiens
agtgatatggcatcg

SEQ ID NO: 171863 - DNA, 15 bp, Homo sapiens
gtgatatggcatcgt

SEQ ID NO: 171864 - DNA, 15 bp, Homo sapiens
tgatatggcatcgtt

SEQ ID NO: 171865 - DNA, 15 bp, Homo sapiens
gatatggcatcgttg

SEQ ID NO: 171866 - DNA, 15 bp, Homo sapiens
atatggcatcgttgc

SEQ ID NO: 171867 - DNA, 15 bp, Homo sapiens
tatggcatcgttgca

SEQ ID NO: 171868 - DNA, 15 bp, Homo sapiens
atggcatcgttgcat

SEQ ID NO: 171869 - DNA, 15 bp, Homo sapiens
tggcatcgttgcatt

SEQ ID NO: 171870 - DNA, 15 bp, Homo sapiens
ggcatcgttgcattt

SEQ ID NO: 171871 - DNA, 15 bp, Homo sapiens
gcatcgttgcatttt

SEQ ID NO: 171872 - DNA, 15 bp, Homo sapiens
catcgttgcatttta

SEQ ID NO: 171873 - DNA, 15 bp, Homo sapiens
atcgttgcattttac

SEQ ID NO: 171874 - DNA, 15 bp, Homo sapiens
tcgttgcattttaca

SEQ ID NO: 171875 - DNA, 15 bp, Homo sapiens
cgttgcattttacag

SEQ ID NO: 171876 - DNA, 15 bp, Homo sapiens
gttgcattttacagt

SEQ ID NO: 171877 - DNA, 15 bp, Homo sapiens
ttgcattttacagta

SEQ ID NO: 171878 - DNA, 15 bp, Homo sapiens
tgcattttacagtat

SEQ ID NO: 171879 - DNA, 15 bp, Homo sapiens
gcattttacagtatc

SEQ ID NO: 171880 - DNA, 15 bp, Homo sapiens
cattttacagtatct

SEQ ID NO: 171881 - DNA, 15 bp, Homo sapiens
attttacagtatctt

SEQ ID NO: 171882 - DNA, 15 bp, Homo sapiens
ttttacagtatcttc

SEQ ID NO: 171883 - DNA, 15 bp, Homo sapiens
tttacagtatcttca

SEQ ID NO: 171884 - DNA, 15 bp, Homo sapiens
ttacagtatcttcaa

SEQ ID NO: 171885 - DNA, 15 bp, Homo sapiens
tacagtatcttcaaa

SEQ ID NO: 171886 - DNA, 15 bp, Homo sapiens
acagtatcttcaaaa

SEQ ID NO: 171887 - DNA, 15 bp, Homo sapiens
cagtatcttcaaaaa

SEQ ID NO: 171888 - DNA, 15 bp, Homo sapiens
agtatcttcaaaaat

SEQ ID NO: 171889 - DNA, 15 bp, Homo sapiens
gtatcttcaaaaata

SEQ ID NO: 171890 - DNA, 15 bp, Homo sapiens
tatcttcaaaaatac

SEQ ID NO: 171891 - DNA, 15 bp, Homo sapiens
atcttcaaaaataca

SEQ ID NO: 171892 - DNA, 15 bp, Homo sapiens
tcttcaaaaatacag

SEQ ID NO: 171893 - DNA, 15 bp, Homo sapiens
cttcaaaaatacaga

SEQ ID NO: 171894 - DNA, 15 bp, Homo sapiens
ttcaaaaatacagaa

SEQ ID NO: 171895 - DNA, 15 bp, Homo sapiens
tcaaaaatacagaat

SEQ ID NO: 171896 - DNA, 15 bp, Homo sapiens
caaaaatacagaatt

SEQ ID NO: 171897 - DNA, 15 bp, Homo sapiens
aaaaatacagaattt

SEQ ID NO: 171898 - DNA, 15 bp, Homo sapiens
aaaatacagaattta

SEQ ID NO: 171899 - DNA, 15 bp, Homo sapiens
aaatacagaatttat

SEQ ID NO: 171900 - DNA, 15 bp, Homo sapiens
aatacagaatttata

SEQ ID NO: 171901 - DNA, 15 bp, Homo sapiens
atacagaatttatag

SEQ ID NO: 171902 - DNA, 15 bp, Homo sapiens
tacagaatttataga

SEQ ID NO: 171903 - DNA, 15 bp, Homo sapiens
acagaatttatagaa

SEQ ID NO: 171904 - DNA, 15 bp, Homo sapiens
cagaatttatagaat

SEQ ID NO: 171905 - DNA, 15 bp, Homo sapiens
agaatttatagaata

SEQ ID NO: 171906 - DNA, 15 bp, Homo sapiens
gaatttatagaataa

SEQ ID NO: 171907 - DNA, 15 bp, Homo sapiens
aatttatagaataat

SEQ ID NO: 171908 - DNA, 15 bp, Homo sapiens
atttatagaataatt

SEQ ID NO: 171909 - DNA, 15 bp, Homo sapiens
tttatagaataattt

SEQ ID NO: 171910 - DNA, 15 bp, Homo sapiens
ttatagaataatttc

SEQ ID NO: 171911 - DNA, 15 bp, Homo sapiens
tatagaataatttct

SEQ ID NO: 171912 - DNA, 15 bp, Homo sapiens
atagaataatttctc

SEQ ID NO: 171913 - DNA, 15 bp, Homo sapiens
tagaataatttctcc

SEQ ID NO: 171914 - DNA, 15 bp, Homo sapiens
agaataatttctcct

SEQ ID NO: 171915 - DNA, 15 bp, Homo sapiens
gaataatttctcctc

SEQ ID NO: 171916 - DNA, 15 bp, Homo sapiens
aataatttctcctca

SEQ ID NO: 171917 - DNA, 15 bp, Homo sapiens
ataatttctcctcat

SEQ ID NO: 171918 - DNA, 15 bp, Homo sapiens
taatttctcctcatt

SEQ ID NO: 171919 - DNA, 15 bp, Homo sapiens
aatttctcctcattt

SEQ ID NO: 171920 - DNA, 15 bp, Homo sapiens
atttctcctcattta

SEQ ID NO: 171921 - DNA, 15 bp, Homo sapiens
tttctcctcatttaa

SEQ ID NO: 171922 - DNA, 15 bp, Homo sapiens
ttctcctcatttaat

SEQ ID NO: 171923 - DNA, 15 bp, Homo sapiens
tctcctcatttaata

SEQ ID NO: 171924 - DNA, 15 bp, Homo sapiens
ctcctcatttaatat

SEQ ID NO: 171925 - DNA, 15 bp, Homo sapiens
tcctcatttaatatt

SEQ ID NO: 171926 - DNA, 15 bp, Homo sapiens
cctcatttaatattt

SEQ ID NO: 171927 - DNA, 15 bp, Homo sapiens
ctcatttaatatttt

SEQ ID NO: 171928 - DNA, 15 bp, Homo sapiens
tcatttaatattttt

SEQ ID NO: 171929 - DNA, 15 bp, Homo sapiens
catttaatatttttc

SEQ ID NO: 171930 - DNA, 15 bp, Homo sapiens
atttaatatttttca

SEQ ID NO: 171931 - DNA, 15 bp, Homo sapiens
tttaatatttttcaa

SEQ ID NO: 171932 - DNA, 15 bp, Homo sapiens
ttaatatttttcaaa

SEQ ID NO: 171933 - DNA, 15 bp, Homo sapiens
taatatttttcaaaa

SEQ ID NO: 171934 - DNA, 15 bp, Homo sapiens
aatatttttcaaaat

SEQ ID NO: 171935 - DNA, 15 bp, Homo sapiens
atatttttcaaaatc

SEQ ID NO: 171936 - DNA, 15 bp, Homo sapiens
tatttttcaaaatca

SEQ ID NO: 171937 - DNA, 15 bp, Homo sapiens
atttttcaaaatcaa

SEQ ID NO: 171938 - DNA, 15 bp, Homo sapiens
tttttcaaaatcaaa

SEQ ID NO: 171939 - DNA, 15 bp, Homo sapiens
ttttcaaaatcaaag

SEQ ID NO: 171940 - DNA, 15 bp, Homo sapiens
tttcaaaatcaaagt

SEQ ID NO: 171941 - DNA, 15 bp, Homo sapiens
ttcaaaatcaaagtt

SEQ ID NO: 171942 - DNA, 15 bp, Homo sapiens
tcaaaatcaaagtta

SEQ ID NO: 171943 - DNA, 15 bp, Homo sapiens
caaaatcaaagttat

SEQ ID NO: 171944 - DNA, 15 bp, Homo sapiens
aaaatcaaagttatg

SEQ ID NO: 171945 - DNA, 15 bp, Homo sapiens
aaatcaaagttatgg

SEQ ID NO: 171946 - DNA, 15 bp, Homo sapiens
aatcaaagttatggt

SEQ ID NO: 171947 - DNA, 15 bp, Homo sapiens
atcaaagttatggtt

SEQ ID NO: 171948 - DNA, 15 bp, Homo sapiens
caaagttatggtttc

SEQ ID NO: 171949 - DNA, 15 bp, Homo sapiens
aaagttatggtttcc

SEQ ID NO: 171950 - DNA, 15 bp, Homo sapiens
aagttatggtttcct

SEQ ID NO: 171951 - DNA, 15 bp, Homo sapiens
agttatggtttcctc

SEQ ID NO: 171952 - DNA, 15 bp, Homo sapiens
gttatggtttcctca

SEQ ID NO: 171953 - DNA, 15 bp, Homo sapiens
ttatggtttcctcat

SEQ ID NO: 171954 - DNA, 15 bp, Homo sapiens
tatggtttcctcatt

SEQ ID NO: 171955 - DNA, 15 bp, Homo sapiens
atggtttcctcattt

SEQ ID NO: 171956 - DNA, 15 bp, Homo sapiens
tggtttcctcatttt

SEQ ID NO: 171957 - DNA, 15 bp, Homo sapiens
ggtttcctcatttta

SEQ ID NO: 171958 - DNA, 15 bp, Homo sapiens
gtttcctcattttac

SEQ ID NO: 171959 - DNA, 15 bp, Homo sapiens
tttcctcattttact

SEQ ID NO: 171960 - DNA, 15 bp, Homo sapiens
ttcctcattttacta

SEQ ID NO: 171961 - DNA, 15 bp, Homo sapiens
tcctcattttactaa

SEQ ID NO: 171962 - DNA, 15 bp, Homo sapiens
cctcattttactaaa

SEQ ID NO: 171963 - DNA, 15 bp, Homo sapiens
ctcattttactaaaa

SEQ ID NO: 171964 - DNA, 15 bp, Homo sapiens
tcattttactaaaat

SEQ ID NO: 171965 - DNA, 15 bp, Homo sapiens
cattttactaaaatc

SEQ ID NO: 171966 - DNA, 15 bp, Homo sapiens
attttactaaaatcg

SEQ ID NO: 171967 - DNA, 15 bp, Homo sapiens
ttttactaaaatcgt

SEQ ID NO: 171968 - DNA, 15 bp, Homo sapiens
tttactaaaatcgta

SEQ ID NO: 171969 - DNA, 15 bp, Homo sapiens
ttactaaaatcgtat

SEQ ID NO: 171970 - DNA, 15 bp, Homo sapiens
tactaaaatcgtatt

SEQ ID NO: 171971 - DNA, 15 bp, Homo sapiens
actaaaatcgtattc

SEQ ID NO: 171972 - DNA, 15 bp, Homo sapiens
ctaaaatcgtattct

SEQ ID NO: 171973 - DNA, 15 bp, Homo sapiens
taaaatcgtattcta

SEQ ID NO: 171974 - DNA, 15 bp, Homo sapiens
aaaatcgtattctaa

SEQ ID NO: 171975 - DNA, 15 bp, Homo sapiens
aaatcgtattctaat

SEQ ID NO: 171976 - DNA, 15 bp, Homo sapiens
aatcgtattctaatt

SEQ ID NO: 171977 - DNA, 15 bp, Homo sapiens
atcgtattctaattc

SEQ ID NO: 171978 - DNA, 15 bp, Homo sapiens
tcgtattctaattct

SEQ ID NO: 171979 - DNA, 15 bp, Homo sapiens
cgtattctaattctt

SEQ ID NO: 171980 - DNA, 15 bp, Homo sapiens
gtattctaattcttc

SEQ ID NO: 171981 - DNA, 15 bp, Homo sapiens
tattctaattcttca

SEQ ID NO: 171982 - DNA, 15 bp, Homo sapiens
attctaattcttcat

SEQ ID NO: 171983 - DNA, 15 bp, Homo sapiens
ttctaattcttcatt

SEQ ID NO: 171984 - DNA, 15 bp, Homo sapiens
tctaattcttcatta

SEQ ID NO: 171985 - DNA, 15 bp, Homo sapiens
ctaattcttcattat

SEQ ID NO: 171986 - DNA, 15 bp, Homo sapiens
taattcttcattata

SEQ ID NO: 171987 - DNA, 15 bp, Homo sapiens
aattcttcattatag

SEQ ID NO: 171988 - DNA, 15 bp, Homo sapiens
attcttcattatagt

SEQ ID NO: 171989 - DNA, 15 bp, Homo sapiens
ttcttcattatagta

SEQ ID NO: 171990 - DNA, 15 bp, Homo sapiens
tcttcattatagtaa

SEQ ID NO: 171991 - DNA, 15 bp, Homo sapiens
cttcattatagtaaa

SEQ ID NO: 171992 - DNA, 15 bp, Homo sapiens
ttcattatagtaaat

SEQ ID NO: 171993 - DNA, 15 bp, Homo sapiens
tcattatagtaaatc

SEQ ID NO: 171994 - DNA, 15 bp, Homo sapiens
cattatagtaaatct

SEQ ID NO: 171995 - DNA, 15 bp, Homo sapiens
attatagtaaatcta

SEQ ID NO: 171996 - DNA, 15 bp, Homo sapiens
ttatagtaaatctat

SEQ ID NO: 171997 - DNA, 15 bp, Homo sapiens
tatagtaaatctatg

SEQ ID NO: 171998 - DNA, 15 bp, Homo sapiens
atagtaaatctatga

SEQ ID NO: 171999 - DNA, 15 bp, Homo sapiens
tagtaaatctatgag

SEQ ID NO: 172000 - DNA, 15 bp, Homo sapiens
agtaaatctatgagc

SEQ ID NO: 172001 - DNA, 15 bp, Homo sapiens
gtaaatctatgagca

SEQ ID NO: 172002 - DNA, 15 bp, Homo sapiens
taaatctatgagcaa

SEQ ID NO: 172003 - DNA, 15 bp, Homo sapiens
aaatctatgagcaac

SEQ ID NO: 172004 - DNA, 15 bp, Homo sapiens
aatctatgagcaact

SEQ ID NO: 172005 - DNA, 15 bp, Homo sapiens
atctatgagcaactc

SEQ ID NO: 172006 - DNA, 15 bp, Homo sapiens
tctatgagcaactcc

SEQ ID NO: 172007 - DNA, 15 bp, Homo sapiens
ctatgagcaactcct

SEQ ID NO: 172008 - DNA, 15 bp, Homo sapiens
tatgagcaactcctt

SEQ ID NO: 172009 - DNA, 15 bp, Homo sapiens
atgagcaactcctta

SEQ ID NO: 172010 - DNA, 15 bp, Homo sapiens
tgagcaactccttac

SEQ ID NO: 172011 - DNA, 15 bp, Homo sapiens
gagcaactccttact

SEQ ID NO: 172012 - DNA, 15 bp, Homo sapiens
agcaactccttactt

SEQ ID NO: 172013 - DNA, 15 bp, Homo sapiens
gcaactccttacttc

SEQ ID NO: 172014 - DNA, 15 bp, Homo sapiens
caactccttacttcg

SEQ ID NO: 172015 - DNA, 15 bp, Homo sapiens
aactccttacttcgg

SEQ ID NO: 172016 - DNA, 15 bp, Homo sapiens
actccttacttcggt

SEQ ID NO: 172017 - DNA, 15 bp, Homo sapiens
ctccttacttcggtt

SEQ ID NO: 172018 - DNA, 15 bp, Homo sapiens
tccttacttcggttc

SEQ ID NO: 172019 - DNA, 15 bp, Homo sapiens
ccttacttcggttcc

SEQ ID NO: 172020 - DNA, 15 bp, Homo sapiens
cttacttcggttcct

SEQ ID NO: 172021 - DNA, 15 bp, Homo sapiens
ttacttcggttcctc

SEQ ID NO: 172022 - DNA, 15 bp, Homo sapiens
tacttcggttcctct

SEQ ID NO: 172023 - DNA, 15 bp, Homo sapiens
acttcggttcctctg

SEQ ID NO: 172024 - DNA, 15 bp, Homo sapiens
cttcggttcctctga

SEQ ID NO: 172025 - DNA, 15 bp, Homo sapiens
ttcggttcctctgat

SEQ ID NO: 172026 - DNA, 15 bp, Homo sapiens
tcggttcctctgatt

SEQ ID NO: 172027 - DNA, 15 bp, Homo sapiens
cggttcctctgattt

SEQ ID NO: 172028 - DNA, 15 bp, Homo sapiens
ggttcctctgatttc

SEQ ID NO: 172029 - DNA, 15 bp, Homo sapiens
gttcctctgatttca

SEQ ID NO: 172030 - DNA, 15 bp, Homo sapiens
ttcctctgatttcaa

SEQ ID NO: 172031 - DNA, 15 bp, Homo sapiens
tcctctgatttcaag

SEQ ID NO: 172032 - DNA, 15 bp, Homo sapiens
cctctgatttcaagg

SEQ ID NO: 172033 - DNA, 15 bp, Homo sapiens
ctctgatttcaaggc

SEQ ID NO: 172034 - DNA, 15 bp, Homo sapiens
tctgatttcaaggcc

SEQ ID NO: 172035 - DNA, 15 bp, Homo sapiens
ctgatttcaaggcca

SEQ ID NO: 172036 - DNA, 15 bp, Homo sapiens
tgatttcaaggccat

SEQ ID NO: 172037 - DNA, 15 bp, Homo sapiens
gatttcaaggccata

SEQ ID NO: 172038 - DNA, 15 bp, Homo sapiens
atttcaaggccatat

SEQ ID NO: 172039 - DNA, 15 bp, Homo sapiens
tttcaaggccatatt

SEQ ID NO: 172040 - DNA, 15 bp, Homo sapiens
ttcaaggccatattt

SEQ ID NO: 172041 - DNA, 15 bp, Homo sapiens
tcaaggccatatttt

SEQ ID NO: 172042 - DNA, 15 bp, Homo sapiens
caaggccatatttta

SEQ ID NO: 172043 - DNA, 15 bp, Homo sapiens
aaggccatattttaa

SEQ ID NO: 172044 - DNA, 15 bp, Homo sapiens
aggccatattttaaa

SEQ ID NO: 172045 - DNA, 15 bp, Homo sapiens
ggccatattttaaaa

SEQ ID NO: 172046 - DNA, 15 bp, Homo sapiens
gccatattttaaaaa

SEQ ID NO: 172047 - DNA, 15 bp, Homo sapiens
ccatattttaaaaaa

SEQ ID NO: 172048 - DNA, 15 bp, Homo sapiens
catattttaaaaaat

SEQ ID NO: 172049 - DNA, 15 bp, Homo sapiens
atattttaaaaaatc

SEQ ID NO: 172050 - DNA, 15 bp, Homo sapiens
tattttaaaaaatca

SEQ ID NO: 172051 - DNA, 15 bp, Homo sapiens
attttaaaaaatcaa

SEQ ID NO: 172052 - DNA, 15 bp, Homo sapiens
ttttaaaaaatcaaa

SEQ ID NO: 172053 - DNA, 15 bp, Homo sapiens
tttaaaaaatcaaaa

SEQ ID NO: 172054 - DNA, 15 bp, Homo sapiens
ttaaaaaatcaaaag

SEQ ID NO: 172055 - DNA, 15 bp, Homo sapiens
taaaaaatcaaaagg

SEQ ID NO: 172056 - DNA, 15 bp, Homo sapiens
aaaaaatcaaaaggc

SEQ ID NO: 172057 - DNA, 15 bp, Homo sapiens
aaaaatcaaaaggca

SEQ ID NO: 172058 - DNA, 15 bp, Homo sapiens
aaaatcaaaaggcac

SEQ ID NO: 172059 - DNA, 15 bp, Homo sapiens
aaatcaaaaggcact

SEQ ID NO: 172060 - DNA, 15 bp, Homo sapiens
aatcaaaaggcactg

SEQ ID NO: 172061 - DNA, 15 bp, Homo sapiens
atcaaaaggcactgt

SEQ ID NO: 172062 - DNA, 15 bp, Homo sapiens
tcaaaaggcactgtg

SEQ ID NO: 172063 - DNA, 15 bp, Homo sapiens
caaaaggcactgtga

SEQ ID NO: 172064 - DNA, 15 bp, Homo sapiens
aaaaggcactgtgaa

SEQ ID NO: 172065 - DNA, 15 bp, Homo sapiens
aaaggcactgtgaac

SEQ ID NO: 172066 - DNA, 15 bp, Homo sapiens
aaggcactgtgaact

SEQ ID NO: 172067 - DNA, 15 bp, Homo sapiens
aggcactgtgaacta

SEQ ID NO: 172068 - DNA, 15 bp, Homo sapiens
ggcactgtgaactat

SEQ ID NO: 172069 - DNA, 15 bp, Homo sapiens
gcactgtgaactatt

SEQ ID NO: 172070 - DNA, 15 bp, Homo sapiens
cactgtgaactattt

SEQ ID NO: 172071 - DNA, 15 bp, Homo sapiens
actgtgaactatttt

SEQ ID NO: 172072 - DNA, 15 bp, Homo sapiens
ctgtgaactattttg

SEQ ID NO: 172073 - DNA, 15 bp, Homo sapiens
tgtgaactattttga

SEQ ID NO: 172074 - DNA, 15 bp, Homo sapiens
gtgaactattttgaa

SEQ ID NO: 172075 - DNA, 15 bp, Homo sapiens
tgaactattttgaag

SEQ ID NO: 172076 - DNA, 15 bp, Homo sapiens
gaactattttgaaga

SEQ ID NO: 172077 - DNA, 15 bp, Homo sapiens
aactattttgaagaa

SEQ ID NO: 172078 - DNA, 15 bp, Homo sapiens
actattttgaagaaa

SEQ ID NO: 172079 - DNA, 15 bp, Homo sapiens
ctattttgaagaaaa

SEQ ID NO: 172080 - DNA, 15 bp, Homo sapiens
tattttgaagaaaac

SEQ ID NO: 172081 - DNA, 15 bp, Homo sapiens
attttgaagaaaaca

SEQ ID NO: 172082 - DNA, 15 bp, Homo sapiens
ttttgaagaaaacac

SEQ ID NO: 172083 - DNA, 15 bp, Homo sapiens
tttgaagaaaacaca

SEQ ID NO: 172084 - DNA, 15 bp, Homo sapiens
ttgaagaaaacacaa

SEQ ID NO: 172085 - DNA, 15 bp, Homo sapiens
tgaagaaaacacaac

SEQ ID NO: 172086 - DNA, 15 bp, Homo sapiens
gaagaaaacacaaca

SEQ ID NO: 172087 - DNA, 15 bp, Homo sapiens
aagaaaacacaacat

SEQ ID NO: 172088 - DNA, 15 bp, Homo sapiens
agaaaacacaacatt

SEQ ID NO: 172089 - DNA, 15 bp, Homo sapiens
gaaaacacaacattt

SEQ ID NO: 172090 - DNA, 15 bp, Homo sapiens
aaaacacaacatttt

SEQ ID NO: 172091 - DNA, 15 bp, Homo sapiens
aaacacaacatttta

SEQ ID NO: 172092 - DNA, 15 bp, Homo sapiens
aacacaacattttaa

SEQ ID NO: 172093 - DNA, 15 bp, Homo sapiens
acacaacattttaat

SEQ ID NO: 172094 - DNA, 15 bp, Homo sapiens
cacaacattttaata

SEQ ID NO: 172095 - DNA, 15 bp, Homo sapiens
acaacattttaatac

SEQ ID NO: 172096 - DNA, 15 bp, Homo sapiens
caacattttaataca

SEQ ID NO: 172097 - DNA, 15 bp, Homo sapiens
aacattttaatacag

SEQ ID NO: 172098 - DNA, 15 bp, Homo sapiens
acattttaatacaga

SEQ ID NO: 172099 - DNA, 15 bp, Homo sapiens
cattttaatacagat

SEQ ID NO: 172100 - DNA, 15 bp, Homo sapiens
attttaatacagatt

SEQ ID NO: 172101 - DNA, 15 bp, Homo sapiens
ttttaatacagattg

SEQ ID NO: 172102 - DNA, 15 bp, Homo sapiens
tttaatacagattga

SEQ ID NO: 172103 - DNA, 15 bp, Homo sapiens
ttaatacagattgaa

SEQ ID NO: 172104 - DNA, 15 bp, Homo sapiens
taatacagattgaaa

SEQ ID NO: 172105 - DNA, 15 bp, Homo sapiens
aatacagattgaaag

SEQ ID NO: 172106 - DNA, 15 bp, Homo sapiens
atacagattgaaagg

SEQ ID NO: 172107 - DNA, 15 bp, Homo sapiens
tacagattgaaagga

SEQ ID NO: 172108 - DNA, 15 bp, Homo sapiens
acagattgaaaggac

SEQ ID NO: 172109 - DNA, 15 bp, Homo sapiens
cagattgaaaggacc

SEQ ID NO: 172110 - DNA, 15 bp, Homo sapiens
agattgaaaggacct

SEQ ID NO: 172111 - DNA, 15 bp, Homo sapiens
gattgaaaggacctc

SEQ ID NO: 172112 - DNA, 15 bp, Homo sapiens
attgaaaggacctct

SEQ ID NO: 172113 - DNA, 15 bp, Homo sapiens
ttgaaaggacctctt

SEQ ID NO: 172114 - DNA, 15 bp, Homo sapiens
tgaaaggacctcttc

SEQ ID NO: 172115 - DNA, 15 bp, Homo sapiens
gaaaggacctcttct

SEQ ID NO: 172116 - DNA, 15 bp, Homo sapiens
aaaggacctcttctg

SEQ ID NO: 172117 - DNA, 15 bp, Homo sapiens
aaggacctcttctga

SEQ ID NO: 172118 - DNA, 15 bp, Homo sapiens
aggacctcttctgaa

SEQ ID NO: 172119 - DNA, 15 bp, Homo sapiens
ggacctcttctgaag

SEQ ID NO: 172120 - DNA, 15 bp, Homo sapiens
gacctcttctgaagc

SEQ ID NO: 172121 - DNA, 15 bp, Homo sapiens
acctcttctgaagct

SEQ ID NO: 172122 - DNA, 15 bp, Homo sapiens
cctcttctgaagcta

SEQ ID NO: 172123 - DNA, 15 bp, Homo sapiens
ctcttctgaagctag

SEQ ID NO: 172124 - DNA, 15 bp, Homo sapiens
tcttctgaagctaga

SEQ ID NO: 172125 - DNA, 15 bp, Homo sapiens
cttctgaagctagaa

SEQ ID NO: 172126 - DNA, 15 bp, Homo sapiens
ttctgaagctagaaa

SEQ ID NO: 172127 - DNA, 15 bp, Homo sapiens
tctgaagctagaaac

SEQ ID NO: 172128 - DNA, 15 bp, Homo sapiens
ctgaagctagaaaca

SEQ ID NO: 172129 - DNA, 15 bp, Homo sapiens
tgaagctagaaacaa

SEQ ID NO: 172130 - DNA, 15 bp, Homo sapiens
gaagctagaaacaat

SEQ ID NO: 172131 - DNA, 15 bp, Homo sapiens
aagctagaaacaatc

SEQ ID NO: 172132 - DNA, 15 bp, Homo sapiens
agctagaaacaatct

SEQ ID NO: 172133 - DNA, 15 bp, Homo sapiens
gctagaaacaatcta

SEQ ID NO: 172134 - DNA, 15 bp, Homo sapiens
ctagaaacaatctat

SEQ ID NO: 172135 - DNA, 15 bp, Homo sapiens
tagaaacaatctata

SEQ ID NO: 172136 - DNA, 15 bp, Homo sapiens
agaaacaatctatag

SEQ ID NO: 172137 - DNA, 15 bp, Homo sapiens
gaaacaatctatagt

SEQ ID NO: 172138 - DNA, 15 bp, Homo sapiens
aaacaatctatagtt

SEQ ID NO: 172139 - DNA, 15 bp, Homo sapiens
aacaatctatagtta

SEQ ID NO: 172140 - DNA, 15 bp, Homo sapiens
acaatctatagttat

SEQ ID NO: 172141 - DNA, 15 bp, Homo sapiens
caatctatagttata

SEQ ID NO: 172142 - DNA, 15 bp, Homo sapiens
aatctatagttatac

SEQ ID NO: 172143 - DNA, 15 bp, Homo sapiens
atctatagttataca

SEQ ID NO: 172144 - DNA, 15 bp, Homo sapiens
tctatagttatacat

SEQ ID NO: 172145 - DNA, 15 bp, Homo sapiens
ctatagttatacatc

SEQ ID NO: 172146 - DNA, 15 bp, Homo sapiens
tatagttatacatct

SEQ ID NO: 172147 - DNA, 15 bp, Homo sapiens
atagttatacatctt

SEQ ID NO: 172148 - DNA, 15 bp, Homo sapiens
tagttatacatcttc

SEQ ID NO: 172149 - DNA, 15 bp, Homo sapiens
agttatacatcttca

SEQ ID NO: 172150 - DNA, 15 bp, Homo sapiens
gttatacatcttcat

SEQ ID NO: 172151 - DNA, 15 bp, Homo sapiens
ttatacatcttcatt

SEQ ID NO: 172152 - DNA, 15 bp, Homo sapiens
tatacatcttcatta

SEQ ID NO: 172153 - DNA, 15 bp, Homo sapiens
atacatcttcattaa

SEQ ID NO: 172154 - DNA, 15 bp, Homo sapiens
tacatcttcattaat

SEQ ID NO: 172155 - DNA, 15 bp, Homo sapiens
acatcttcattaata

SEQ ID NO: 172156 - DNA, 15 bp, Homo sapiens
catcttcattaatac

SEQ ID NO: 172157 - DNA, 15 bp, Homo sapiens
atcttcattaatact

SEQ ID NO: 172158 - DNA, 15 bp, Homo sapiens
tcttcattaatactg

SEQ ID NO: 172159 - DNA, 15 bp, Homo sapiens
cttcattaatactgt

SEQ ID NO: 172160 - DNA, 15 bp, Homo sapiens
ttcattaatactgtg

SEQ ID NO: 172161 - DNA, 15 bp, Homo sapiens
tcattaatactgtgt

SEQ ID NO: 172162 - DNA, 15 bp, Homo sapiens
cattaatactgtgtt

SEQ ID NO: 172163 - DNA, 15 bp, Homo sapiens
attaatactgtgtta

SEQ ID NO: 172164 - DNA, 15 bp, Homo sapiens
ttaatactgtgttac

SEQ ID NO: 172165 - DNA, 15 bp, Homo sapiens
taatactgtgttacc

SEQ ID NO: 172166 - DNA, 15 bp, Homo sapiens
aatactgtgttacct

SEQ ID NO: 172167 - DNA, 15 bp, Homo sapiens
atactgtgttacctt

SEQ ID NO: 172168 - DNA, 15 bp, Homo sapiens
tactgtgttaccttt

SEQ ID NO: 172169 - DNA, 15 bp, Homo sapiens
actgtgttacctttt

SEQ ID NO: 172170 - DNA, 15 bp, Homo sapiens
ctgtgttacctttta

SEQ ID NO: 172171 - DNA, 15 bp, Homo sapiens
tgtgttaccttttaa

SEQ ID NO: 172172 - DNA, 15 bp, Homo sapiens
gtgttaccttttaaa

SEQ ID NO: 172173 - DNA, 15 bp, Homo sapiens
tgttaccttttaaaa

SEQ ID NO: 172174 - DNA, 15 bp, Homo sapiens
gttaccttttaaaat

SEQ ID NO: 172175 - DNA, 15 bp, Homo sapiens
ttaccttttaaaata

SEQ ID NO: 172176 - DNA, 15 bp, Homo sapiens
taccttttaaaatag

SEQ ID NO: 172177 - DNA, 15 bp, Homo sapiens
accttttaaaatagt

SEQ ID NO: 172178 - DNA, 15 bp, Homo sapiens
ccttttaaaatagta

SEQ ID NO: 172179 - DNA, 15 bp, Homo sapiens
cttttaaaatagtaa

SEQ ID NO: 172180 - DNA, 15 bp, Homo sapiens
ttttaaaatagtaat

SEQ ID NO: 172181 - DNA, 15 bp, Homo sapiens
tttaaaatagtaatt

SEQ ID NO: 172182 - DNA, 15 bp, Homo sapiens
ttaaaatagtaattt

SEQ ID NO: 172183 - DNA, 15 bp, Homo sapiens
taaaatagtaatttt

SEQ ID NO: 172184 - DNA, 15 bp, Homo sapiens
aaaatagtaattttt

SEQ ID NO: 172185 - DNA, 15 bp, Homo sapiens
aaatagtaatttttt

SEQ ID NO: 172186 - DNA, 15 bp, Homo sapiens
aatagtaatttttta

SEQ ID NO: 172187 - DNA, 15 bp, Homo sapiens
atagtaattttttac

SEQ ID NO: 172188 - DNA, 15 bp, Homo sapiens
tagtaattttttaca

SEQ ID NO: 172189 - DNA, 15 bp, Homo sapiens
agtaattttttacat

SEQ ID NO: 172190 - DNA, 15 bp, Homo sapiens
gtaattttttacatt

SEQ ID NO: 172191 - DNA, 15 bp, Homo sapiens
taattttttacattt

SEQ ID NO: 172192 - DNA, 15 bp, Homo sapiens
aattttttacatttt

SEQ ID NO: 172193 - DNA, 15 bp, Homo sapiens
attttttacattttc

SEQ ID NO: 172194 - DNA, 15 bp, Homo sapiens
ttttttacattttcc

SEQ ID NO: 172195 - DNA, 15 bp, Homo sapiens
tttttacattttcct

SEQ ID NO: 172196 - DNA, 15 bp, Homo sapiens
ttttacattttcctg

SEQ ID NO: 172197 - DNA, 15 bp, Homo sapiens
tttacattttcctgt

SEQ ID NO: 172198 - DNA, 15 bp, Homo sapiens
ttacattttcctgtg

SEQ ID NO: 172199 - DNA, 15 bp, Homo sapiens
tacattttcctgtgt

SEQ ID NO: 172200 - DNA, 15 bp, Homo sapiens
acattttcctgtgta

SEQ ID NO: 172201 - DNA, 15 bp, Homo sapiens
cattttcctgtgtaa

SEQ ID NO: 172202 - DNA, 15 bp, Homo sapiens
attttcctgtgtaaa

SEQ ID NO: 172203 - DNA, 15 bp, Homo sapiens
ttttcctgtgtaaac

SEQ ID NO: 172204 - DNA, 15 bp, Homo sapiens
tttcctgtgtaaacc

SEQ ID NO: 172205 - DNA, 15 bp, Homo sapiens
ttcctgtgtaaacct

SEQ ID NO: 172206 - DNA, 15 bp, Homo sapiens
tcctgtgtaaaccta

SEQ ID NO: 172207 - DNA, 15 bp, Homo sapiens
cctgtgtaaacctaa

SEQ ID NO: 172208 - DNA, 15 bp, Homo sapiens
ctgtgtaaacctaat

SEQ ID NO: 172209 - DNA, 15 bp, Homo sapiens
tgtgtaaacctaatt

SEQ ID NO: 172210 - DNA, 15 bp, Homo sapiens
gtgtaaacctaattg

SEQ ID NO: 172211 - DNA, 15 bp, Homo sapiens
tgtaaacctaattgt

SEQ ID NO: 172212 - DNA, 15 bp, Homo sapiens
gtaaacctaattgtg

SEQ ID NO: 172213 - DNA, 15 bp, Homo sapiens
taaacctaattgtgg

SEQ ID NO: 172214 - DNA, 15 bp, Homo sapiens
aaacctaattgtggt

SEQ ID NO: 172215 - DNA, 15 bp, Homo sapiens
aacctaattgtggta

SEQ ID NO: 172216 - DNA, 15 bp, Homo sapiens
acctaattgtggtag

SEQ ID NO: 172217 - DNA, 15 bp, Homo sapiens
cctaattgtggtaga

SEQ ID NO: 172218 - DNA, 15 bp, Homo sapiens
ctaattgtggtagaa

SEQ ID NO: 172219 - DNA, 15 bp, Homo sapiens
taattgtggtagaaa

SEQ ID NO: 172220 - DNA, 15 bp, Homo sapiens
aattgtggtagaaat

SEQ ID NO: 172221 - DNA, 15 bp, Homo sapiens
attgtggtagaaatt

SEQ ID NO: 172222 - DNA, 15 bp, Homo sapiens
ttgtggtagaaattt

SEQ ID NO: 172223 - DNA, 15 bp, Homo sapiens
tgtggtagaaatttt

SEQ ID NO: 172224 - DNA, 15 bp, Homo sapiens
gtggtagaaattttt

SEQ ID NO: 172225 - DNA, 15 bp, Homo sapiens
tggtagaaattttta

SEQ ID NO: 172226 - DNA, 15 bp, Homo sapiens
ggtagaaatttttac

SEQ ID NO: 172227 - DNA, 15 bp, Homo sapiens
gtagaaatttttacc

SEQ ID NO: 172228 - DNA, 15 bp, Homo sapiens
tagaaatttttacca

SEQ ID NO: 172229 - DNA, 15 bp, Homo sapiens
agaaatttttaccaa

SEQ ID NO: 172230 - DNA, 15 bp, Homo sapiens
gaaatttttaccaac

SEQ ID NO: 172231 - DNA, 15 bp, Homo sapiens
aaatttttaccaact

SEQ ID NO: 172232 - DNA, 15 bp, Homo sapiens
aatttttaccaactc

SEQ ID NO: 172233 - DNA, 15 bp, Homo sapiens
atttttaccaactct

SEQ ID NO: 172234 - DNA, 15 bp, Homo sapiens
tttttaccaactcta

SEQ ID NO: 172235 - DNA, 15 bp, Homo sapiens
ttttaccaactctat

SEQ ID NO: 172236 - DNA, 15 bp, Homo sapiens
tttaccaactctata

SEQ ID NO: 172237 - DNA, 15 bp, Homo sapiens
ttaccaactctatac

SEQ ID NO: 172238 - DNA, 15 bp, Homo sapiens
taccaactctatact

SEQ ID NO: 172239 - DNA, 15 bp, Homo sapiens
accaactctatactc

SEQ ID NO: 172240 - DNA, 15 bp, Homo sapiens
ccaactctatactca

SEQ ID NO: 172241 - DNA, 15 bp, Homo sapiens
caactctatactcaa

SEQ ID NO: 172242 - DNA, 15 bp, Homo sapiens
aactctatactcaat

SEQ ID NO: 172243 - DNA, 15 bp, Homo sapiens
actctatactcaatc

SEQ ID NO: 172244 - DNA, 15 bp, Homo sapiens
ctctatactcaatca

SEQ ID NO: 172245 - DNA, 15 bp, Homo sapiens
tctatactcaatcaa

SEQ ID NO: 172246 - DNA, 15 bp, Homo sapiens
ctatactcaatcaag

SEQ ID NO: 172247 - DNA, 15 bp, Homo sapiens
tatactcaatcaagc

SEQ ID NO: 172248 - DNA, 15 bp, Homo sapiens
atactcaatcaagca

SEQ ID NO: 172249 - DNA, 15 bp, Homo sapiens
tactcaatcaagcaa

SEQ ID NO: 172250 - DNA, 15 bp, Homo sapiens
actcaatcaagcaaa

SEQ ID NO: 172251 - DNA, 15 bp, Homo sapiens
ctcaatcaagcaaaa

SEQ ID NO: 172252 - DNA, 15 bp, Homo sapiens
tcaatcaagcaaaat

SEQ ID NO: 172253 - DNA, 15 bp, Homo sapiens
caatcaagcaaaatt

SEQ ID NO: 172254 - DNA, 15 bp, Homo sapiens
aatcaagcaaaattt

SEQ ID NO: 172255 - DNA, 15 bp, Homo sapiens
atcaagcaaaatttc

SEQ ID NO: 172256 - DNA, 15 bp, Homo sapiens
tcaagcaaaatttct

SEQ ID NO: 172257 - DNA, 15 bp, Homo sapiens
caagcaaaatttctg

SEQ ID NO: 172258 - DNA, 15 bp, Homo sapiens
aagcaaaatttctgt

SEQ ID NO: 172259 - DNA, 15 bp, Homo sapiens
agcaaaatttctgta

SEQ ID NO: 172260 - DNA, 15 bp, Homo sapiens
gcaaaatttctgtat

SEQ ID NO: 172261 - DNA, 15 bp, Homo sapiens
caaaatttctgtata

SEQ ID NO: 172262 - DNA, 15 bp, Homo sapiens
aaaatttctgtatat

SEQ ID NO: 172263 - DNA, 15 bp, Homo sapiens
aaatttctgtatatt

SEQ ID NO: 172264 - DNA, 15 bp, Homo sapiens
aatttctgtatattc

SEQ ID NO: 172265 - DNA, 15 bp, Homo sapiens
atttctgtatattcc

SEQ ID NO: 172266 - DNA, 15 bp, Homo sapiens
tttctgtatattccc

SEQ ID NO: 172267 - DNA, 15 bp, Homo sapiens
ttctgtatattccct

SEQ ID NO: 172268 - DNA, 15 bp, Homo sapiens
tctgtatattccctg

SEQ ID NO: 172269 - DNA, 15 bp, Homo sapiens
ctgtatattccctgt

SEQ ID NO: 172270 - DNA, 15 bp, Homo sapiens
tgtatattccctgtg

SEQ ID NO: 172271 - DNA, 15 bp, Homo sapiens
gtatattccctgtgg

SEQ ID NO: 172272 - DNA, 15 bp, Homo sapiens
tatattccctgtgga

SEQ ID NO: 172273 - DNA, 15 bp, Homo sapiens
atattccctgtggaa

SEQ ID NO: 172274 - DNA, 15 bp, Homo sapiens
tattccctgtggaat

SEQ ID NO: 172275 - DNA, 15 bp, Homo sapiens
attccctgtggaatg

SEQ ID NO: 172276 - DNA, 15 bp, Homo sapiens
ttccctgtggaatgt

SEQ ID NO: 172277 - DNA, 15 bp, Homo sapiens
tccctgtggaatgta

SEQ ID NO: 172278 - DNA, 15 bp, Homo sapiens
ccctgtggaatgtac

SEQ ID NO: 172279 - DNA, 15 bp, Homo sapiens
cctgtggaatgtacc

SEQ ID NO: 172280 - DNA, 15 bp, Homo sapiens
ctgtggaatgtacct

SEQ ID NO: 172281 - DNA, 15 bp, Homo sapiens
tgtggaatgtaccta

SEQ ID NO: 172282 - DNA, 15 bp, Homo sapiens
gtggaatgtacctat

SEQ ID NO: 172283 - DNA, 15 bp, Homo sapiens
tggaatgtacctatg

SEQ ID NO: 172284 - DNA, 15 bp, Homo sapiens
ggaatgtacctatgt

SEQ ID NO: 172285 - DNA, 15 bp, Homo sapiens
gaatgtacctatgtg

SEQ ID NO: 172286 - DNA, 15 bp, Homo sapiens
aatgtacctatgtga

SEQ ID NO: 172287 - DNA, 15 bp, Homo sapiens
atgtacctatgtgag

SEQ ID NO: 172288 - DNA, 15 bp, Homo sapiens
tgtacctatgtgagt

SEQ ID NO: 172289 - DNA, 15 bp, Homo sapiens
gtacctatgtgagtt

SEQ ID NO: 172290 - DNA, 15 bp, Homo sapiens
tacctatgtgagttt

SEQ ID NO: 172291 - DNA, 15 bp, Homo sapiens
acctatgtgagtttc

SEQ ID NO: 172292 - DNA, 15 bp, Homo sapiens
cctatgtgagtttca

SEQ ID NO: 172293 - DNA, 15 bp, Homo sapiens
ctatgtgagtttcag

SEQ ID NO: 172294 - DNA, 15 bp, Homo sapiens
tatgtgagtttcaga

SEQ ID NO: 172295 - DNA, 15 bp, Homo sapiens
atgtgagtttcagaa

SEQ ID NO: 172296 - DNA, 15 bp, Homo sapiens
tgtgagtttcagaaa

SEQ ID NO: 172297 - DNA, 15 bp, Homo sapiens
gtgagtttcagaaat

SEQ ID NO: 172298 - DNA, 15 bp, Homo sapiens
tgagtttcagaaatt

SEQ ID NO: 172299 - DNA, 15 bp, Homo sapiens
gagtttcagaaattc

SEQ ID NO: 172300 - DNA, 15 bp, Homo sapiens
agtttcagaaattct

SEQ ID NO: 172301 - DNA, 15 bp, Homo sapiens
gtttcagaaattctc

SEQ ID NO: 172302 - DNA, 15 bp, Homo sapiens
tttcagaaattctca

SEQ ID NO: 172303 - DNA, 15 bp, Homo sapiens
ttcagaaattctcaa

SEQ ID NO: 172304 - DNA, 15 bp, Homo sapiens
tcagaaattctcaaa

SEQ ID NO: 172305 - DNA, 15 bp, Homo sapiens
cagaaattctcaaaa

SEQ ID NO: 172306 - DNA, 15 bp, Homo sapiens
agaaattctcaaaat

SEQ ID NO: 172307 - DNA, 15 bp, Homo sapiens
gaaattctcaaaata

SEQ ID NO: 172308 - DNA, 15 bp, Homo sapiens
aaattctcaaaatac

SEQ ID NO: 172309 - DNA, 15 bp, Homo sapiens
aattctcaaaatacg

SEQ ID NO: 172310 - DNA, 15 bp, Homo sapiens
attctcaaaatacgt

SEQ ID NO: 172311 - DNA, 15 bp, Homo sapiens
ttctcaaaatacgtg

SEQ ID NO: 172312 - DNA, 15 bp, Homo sapiens
tctcaaaatacgtgt

SEQ ID NO: 172313 - DNA, 15 bp, Homo sapiens
ctcaaaatacgtgtt

SEQ ID NO: 172314 - DNA, 15 bp, Homo sapiens
tcaaaatacgtgttc

SEQ ID NO: 172315 - DNA, 15 bp, Homo sapiens
caaaatacgtgttca

SEQ ID NO: 172316 - DNA, 15 bp, Homo sapiens
aaaatacgtgttcaa

SEQ ID NO: 172317 - DNA, 15 bp, Homo sapiens
aaatacgtgttcaaa

SEQ ID NO: 172318 - DNA, 15 bp, Homo sapiens
aatacgtgttcaaaa

SEQ ID NO: 172319 - DNA, 15 bp, Homo sapiens
atacgtgttcaaaaa

SEQ ID NO: 172320 - DNA, 15 bp, Homo sapiens
tacgtgttcaaaaat

SEQ ID NO: 172321 - DNA, 15 bp, Homo sapiens
acgtgttcaaaaatt

SEQ ID NO: 172322 - DNA, 15 bp, Homo sapiens
cgtgttcaaaaattt

SEQ ID NO: 172323 - DNA, 15 bp, Homo sapiens
gtgttcaaaaatttc

SEQ ID NO: 172324 - DNA, 15 bp, Homo sapiens
tgttcaaaaatttct

SEQ ID NO: 172325 - DNA, 15 bp, Homo sapiens
gttcaaaaatttctg

SEQ ID NO: 172326 - DNA, 15 bp, Homo sapiens
ttcaaaaatttctgc

SEQ ID NO: 172327 - DNA, 15 bp, Homo sapiens
tcaaaaatttctgct

SEQ ID NO: 172328 - DNA, 15 bp, Homo sapiens
caaaaatttctgctt

SEQ ID NO: 172329 - DNA, 15 bp, Homo sapiens
aaaatttctgctttt

SEQ ID NO: 172330 - DNA, 15 bp, Homo sapiens
aaatttctgcttttg

SEQ ID NO: 172331 - DNA, 15 bp, Homo sapiens
aatttctgcttttgc

SEQ ID NO: 172332 - DNA, 15 bp, Homo sapiens
atttctgcttttgca

SEQ ID NO: 172333 - DNA, 15 bp, Homo sapiens
tttctgcttttgcat

SEQ ID NO: 172334 - DNA, 15 bp, Homo sapiens
ttctgcttttgcatc

SEQ ID NO: 172335 - DNA, 15 bp, Homo sapiens
tctgcttttgcatct

SEQ ID NO: 172336 - DNA, 15 bp, Homo sapiens
ctgcttttgcatctt

SEQ ID NO: 172337 - DNA, 15 bp, Homo sapiens
tgcttttgcatcttt

SEQ ID NO: 172338 - DNA, 15 bp, Homo sapiens
gcttttgcatctttg

SEQ ID NO: 172339 - DNA, 15 bp, Homo sapiens
cttttgcatctttgg

SEQ ID NO: 172340 - DNA, 15 bp, Homo sapiens
ttttgcatctttggg

SEQ ID NO: 172341 - DNA, 15 bp, Homo sapiens
tttgcatctttggga

SEQ ID NO: 172342 - DNA, 15 bp, Homo sapiens
ttgcatctttgggac

SEQ ID NO: 172343 - DNA, 15 bp, Homo sapiens
tgcatctttgggaca

SEQ ID NO: 172344 - DNA, 15 bp, Homo sapiens
gcatctttgggacac

SEQ ID NO: 172345 - DNA, 15 bp, Homo sapiens
catctttgggacacc

SEQ ID NO: 172346 - DNA, 15 bp, Homo sapiens
atctttgggacacct

SEQ ID NO: 172347 - DNA, 15 bp, Homo sapiens
tctttgggacacctc

SEQ ID NO: 172348 - DNA, 15 bp, Homo sapiens
ctttgggacacctca

SEQ ID NO: 172349 - DNA, 15 bp, Homo sapiens
tttgggacacctcag

SEQ ID NO: 172350 - DNA, 15 bp, Homo sapiens
ttgggacacctcaga

SEQ ID NO: 172351 - DNA, 15 bp, Homo sapiens
tgggacacctcagaa

SEQ ID NO: 172352 - DNA, 15 bp, Homo sapiens
gggacacctcagaaa

SEQ ID NO: 172353 - DNA, 15 bp, Homo sapiens
ggacacctcagaaaa

SEQ ID NO: 172354 - DNA, 15 bp, Homo sapiens
gacacctcagaaaac

SEQ ID NO: 172355 - DNA, 15 bp, Homo sapiens
acacctcagaaaact

SEQ ID NO: 172356 - DNA, 15 bp, Homo sapiens
cacctcagaaaactt

SEQ ID NO: 172357 - DNA, 15 bp, Homo sapiens
acctcagaaaactta

SEQ ID NO: 172358 - DNA, 15 bp, Homo sapiens
cctcagaaaacttat

SEQ ID NO: 172359 - DNA, 15 bp, Homo sapiens
ctcagaaaacttatt

SEQ ID NO: 172360 - DNA, 15 bp, Homo sapiens
tcagaaaacttatta

SEQ ID NO: 172361 - DNA, 15 bp, Homo sapiens
cagaaaacttattaa

SEQ ID NO: 172362 - DNA, 15 bp, Homo sapiens
agaaaacttattaac

SEQ ID NO: 172363 - DNA, 15 bp, Homo sapiens
gaaaacttattaaca

SEQ ID NO: 172364 - DNA, 15 bp, Homo sapiens
aaaacttattaacaa

SEQ ID NO: 172365 - DNA, 15 bp, Homo sapiens
aaacttattaacaac

SEQ ID NO: 172366 - DNA, 15 bp, Homo sapiens
aacttattaacaact

SEQ ID NO: 172367 - DNA, 15 bp, Homo sapiens
acttattaacaactg

SEQ ID NO: 172368 - DNA, 15 bp, Homo sapiens
cttattaacaactgt

SEQ ID NO: 172369 - DNA, 15 bp, Homo sapiens
ttattaacaactgtg

SEQ ID NO: 172370 - DNA, 15 bp, Homo sapiens
tattaacaactgtga

SEQ ID NO: 172371 - DNA, 15 bp, Homo sapiens
attaacaactgtgaa

SEQ ID NO: 172372 - DNA, 15 bp, Homo sapiens
ttaacaactgtgaat

SEQ ID NO: 172373 - DNA, 15 bp, Homo sapiens
taacaactgtgaata

SEQ ID NO: 172374 - DNA, 15 bp, Homo sapiens
aacaactgtgaatat

SEQ ID NO: 172375 - DNA, 15 bp, Homo sapiens
acaactgtgaatatg

SEQ ID NO: 172376 - DNA, 15 bp, Homo sapiens
caactgtgaatatga

SEQ ID NO: 172377 - DNA, 15 bp, Homo sapiens
aactgtgaatatgag

SEQ ID NO: 172378 - DNA, 15 bp, Homo sapiens
actgtgaatatgaga

SEQ ID NO: 172379 - DNA, 15 bp, Homo sapiens
ctgtgaatatgagaa

SEQ ID NO: 172380 - DNA, 15 bp, Homo sapiens
tgtgaatatgagaaa

SEQ ID NO: 172381 - DNA, 15 bp, Homo sapiens
gtgaatatgagaaat

SEQ ID NO: 172382 - DNA, 15 bp, Homo sapiens
tgaatatgagaaata

SEQ ID NO: 172383 - DNA, 15 bp, Homo sapiens
gaatatgagaaatac

SEQ ID NO: 172384 - DNA, 15 bp, Homo sapiens
aatatgagaaataca

SEQ ID NO: 172385 - DNA, 15 bp, Homo sapiens
atatgagaaatacag

SEQ ID NO: 172386 - DNA, 15 bp, Homo sapiens
tatgagaaatacaga

SEQ ID NO: 172387 - DNA, 15 bp, Homo sapiens
atgagaaatacagaa

SEQ ID NO: 172388 - DNA, 15 bp, Homo sapiens
tgagaaatacagaag

SEQ ID NO: 172389 - DNA, 15 bp, Homo sapiens
gagaaatacagaaga

SEQ ID NO: 172390 - DNA, 15 bp, Homo sapiens
agaaatacagaagaa

SEQ ID NO: 172391 - DNA, 15 bp, Homo sapiens
gaaatacagaagaaa

SEQ ID NO: 172392 - DNA, 15 bp, Homo sapiens
aaatacagaagaaaa

SEQ ID NO: 172393 - DNA, 15 bp, Homo sapiens
aatacagaagaaaat

SEQ ID NO: 172394 - DNA, 15 bp, Homo sapiens
atacagaagaaaata

SEQ ID NO: 172395 - DNA, 15 bp, Homo sapiens
tacagaagaaaataa

SEQ ID NO: 172396 - DNA, 15 bp, Homo sapiens
acagaagaaaataat

SEQ ID NO: 172397 - DNA, 15 bp, Homo sapiens
cagaagaaaataata

SEQ ID NO: 172398 - DNA, 15 bp, Homo sapiens
agaagaaaataataa

SEQ ID NO: 172399 - DNA, 15 bp, Homo sapiens
gaagaaaataataag

SEQ ID NO: 172400 - DNA, 15 bp, Homo sapiens
aagaaaataataagc

SEQ ID NO: 172401 - DNA, 15 bp, Homo sapiens
agaaaataataagcc

SEQ ID NO: 172402 - DNA, 15 bp, Homo sapiens
gaaaataataagccc

SEQ ID NO: 172403 - DNA, 15 bp, Homo sapiens
aaaataataagccct

SEQ ID NO: 172404 - DNA, 15 bp, Homo sapiens
aaataataagccctc

SEQ ID NO: 172405 - DNA, 15 bp, Homo sapiens
aataataagccctct

SEQ ID NO: 172406 - DNA, 15 bp, Homo sapiens
ataataagccctcta

SEQ ID NO: 172407 - DNA, 15 bp, Homo sapiens
taataagccctctat

SEQ ID NO: 172408 - DNA, 15 bp, Homo sapiens
aataagccctctata

SEQ ID NO: 172409 - DNA, 15 bp, Homo sapiens
ataagccctctatac

SEQ ID NO: 172410 - DNA, 15 bp, Homo sapiens
taagccctctataca

SEQ ID NO: 172411 - DNA, 15 bp, Homo sapiens
aagccctctatacat

SEQ ID NO: 172412 - DNA, 15 bp, Homo sapiens
agccctctatacata

SEQ ID NO: 172413 - DNA, 15 bp, Homo sapiens
gccctctatacataa

SEQ ID NO: 172414 - DNA, 15 bp, Homo sapiens
ccctctatacataaa

SEQ ID NO: 172415 - DNA, 15 bp, Homo sapiens
cctctatacataaat

SEQ ID NO: 172416 - DNA, 15 bp, Homo sapiens
ctctatacataaatg

SEQ ID NO: 172417 - DNA, 15 bp, Homo sapiens
tctatacataaatgc

SEQ ID NO: 172418 - DNA, 15 bp, Homo sapiens
ctatacataaatgcc

SEQ ID NO: 172419 - DNA, 15 bp, Homo sapiens
tatacataaatgccc

SEQ ID NO: 172420 - DNA, 15 bp, Homo sapiens
atacataaatgccca

SEQ ID NO: 172421 - DNA, 15 bp, Homo sapiens
tacataaatgcccag

SEQ ID NO: 172422 - DNA, 15 bp, Homo sapiens
acataaatgcccagc

SEQ ID NO: 172423 - DNA, 15 bp, Homo sapiens
cataaatgcccagca

SEQ ID NO: 172424 - DNA, 15 bp, Homo sapiens
ataaatgcccagcac

SEQ ID NO: 172425 - DNA, 15 bp, Homo sapiens
taaatgcccagcaca

SEQ ID NO: 172426 - DNA, 15 bp, Homo sapiens
aaatgcccagcacaa

SEQ ID NO: 172427 - DNA, 15 bp, Homo sapiens
aatgcccagcacaat

SEQ ID NO: 172428 - DNA, 15 bp, Homo sapiens
atgcccagcacaatt

SEQ ID NO: 172429 - DNA, 15 bp, Homo sapiens
tgcccagcacaattc

SEQ ID NO: 172430 - DNA, 15 bp, Homo sapiens
gcccagcacaattca

SEQ ID NO: 172431 - DNA, 15 bp, Homo sapiens
cccagcacaattcat

SEQ ID NO: 172432 - DNA, 15 bp, Homo sapiens
ccagcacaattcatt

SEQ ID NO: 172433 - DNA, 15 bp, Homo sapiens
cagcacaattcattg

SEQ ID NO: 172434 - DNA, 15 bp, Homo sapiens
agcacaattcattgt

SEQ ID NO: 172435 - DNA, 15 bp, Homo sapiens
gcacaattcattgtt

SEQ ID NO: 172436 - DNA, 15 bp, Homo sapiens
cacaattcattgtta

SEQ ID NO: 172437 - DNA, 15 bp, Homo sapiens
acaattcattgttaa

SEQ ID NO: 172438 - DNA, 15 bp, Homo sapiens
caattcattgttaaa

SEQ ID NO: 172439 - DNA, 15 bp, Homo sapiens
aattcattgttaaaa

SEQ ID NO: 172440 - DNA, 15 bp, Homo sapiens
attcattgttaaaaa

SEQ ID NO: 172441 - DNA, 15 bp, Homo sapiens
ttcattgttaaaaaa

SEQ ID NO: 172442 - DNA, 15 bp, Homo sapiens
tcattgttaaaaaac

SEQ ID NO: 172443 - DNA, 15 bp, Homo sapiens
cattgttaaaaaaca

SEQ ID NO: 172444 - DNA, 15 bp, Homo sapiens
attgttaaaaaacaa

SEQ ID NO: 172445 - DNA, 15 bp, Homo sapiens
ttgttaaaaaacaac

SEQ ID NO: 172446 - DNA, 15 bp, Homo sapiens
tgttaaaaaacaacc

SEQ ID NO: 172447 - DNA, 15 bp, Homo sapiens
gttaaaaaacaacca

SEQ ID NO: 172448 - DNA, 15 bp, Homo sapiens
ttaaaaaacaaccaa

SEQ ID NO: 172449 - DNA, 15 bp, Homo sapiens
taaaaaacaaccaaa

SEQ ID NO: 172450 - DNA, 15 bp, Homo sapiens
aaaaaacaaccaaac

SEQ ID NO: 172451 - DNA, 15 bp, Homo sapiens
aaaaacaaccaaacc

SEQ ID NO: 172452 - DNA, 15 bp, Homo sapiens
aaaacaaccaaacct

SEQ ID NO: 172453 - DNA, 15 bp, Homo sapiens
aaacaaccaaacctc

SEQ ID NO: 172454 - DNA, 15 bp, Homo sapiens
aacaaccaaacctca

SEQ ID NO: 172455 - DNA, 15 bp, Homo sapiens
acaaccaaacctcac

SEQ ID NO: 172456 - DNA, 15 bp, Homo sapiens
caaccaaacctcaca

SEQ ID NO: 172457 - DNA, 15 bp, Homo sapiens
aaccaaacctcacac

SEQ ID NO: 172458 - DNA, 15 bp, Homo sapiens
accaaacctcacact

SEQ ID NO: 172459 - DNA, 15 bp, Homo sapiens
ccaaacctcacacta

SEQ ID NO: 172460 - DNA, 15 bp, Homo sapiens
caaacctcacactac

SEQ ID NO: 172461 - DNA, 15 bp, Homo sapiens
aaacctcacactact

SEQ ID NO: 172462 - DNA, 15 bp, Homo sapiens
aacctcacactactg

SEQ ID NO: 172463 - DNA, 15 bp, Homo sapiens
acctcacactactgt

SEQ ID NO: 172464 - DNA, 15 bp, Homo sapiens
cctcacactactgta

SEQ ID NO: 172465 - DNA, 15 bp, Homo sapiens
ctcacactactgtat

SEQ ID NO: 172466 - DNA, 15 bp, Homo sapiens
tcacactactgtatt

SEQ ID NO: 172467 - DNA, 15 bp, Homo sapiens
cacactactgtattt

SEQ ID NO: 172468 - DNA, 15 bp, Homo sapiens
acactactgtatttc

SEQ ID NO: 172469 - DNA, 15 bp, Homo sapiens
cactactgtatttca

SEQ ID NO: 172470 - DNA, 15 bp, Homo sapiens
actactgtatttcat

SEQ ID NO: 172471 - DNA, 15 bp, Homo sapiens
ctactgtatttcatt

SEQ ID NO: 172472 - DNA, 15 bp, Homo sapiens
tactgtatttcatta

SEQ ID NO: 172473 - DNA, 15 bp, Homo sapiens
actgtatttcattat

SEQ ID NO: 172474 - DNA, 15 bp, Homo sapiens
ctgtatttcattatc

SEQ ID NO: 172475 - DNA, 15 bp, Homo sapiens
tgtatttcattatct

SEQ ID NO: 172476 - DNA, 15 bp, Homo sapiens
gtatttcattatctg

SEQ ID NO: 172477 - DNA, 15 bp, Homo sapiens
tatttcattatctgt

SEQ ID NO: 172478 - DNA, 15 bp, Homo sapiens
atttcattatctgta

SEQ ID NO: 172479 - DNA, 15 bp, Homo sapiens
tttcattatctgtac

SEQ ID NO: 172480 - DNA, 15 bp, Homo sapiens
ttcattatctgtact

SEQ ID NO: 172481 - DNA, 15 bp, Homo sapiens
tcattatctgtactg

SEQ ID NO: 172482 - DNA, 15 bp, Homo sapiens
cattatctgtactga

SEQ ID NO: 172483 - DNA, 15 bp, Homo sapiens
attatctgtactgaa

SEQ ID NO: 172484 - DNA, 15 bp, Homo sapiens
ttatctgtactgaaa

SEQ ID NO: 172485 - DNA, 15 bp, Homo sapiens
tatctgtactgaaag

SEQ ID NO: 172486 - DNA, 15 bp, Homo sapiens
atctgtactgaaagc

SEQ ID NO: 172487 - DNA, 15 bp, Homo sapiens
tctgtactgaaagca

SEQ ID NO: 172488 - DNA, 15 bp, Homo sapiens
ctgtactgaaagcaa

SEQ ID NO: 172489 - DNA, 15 bp, Homo sapiens
tgtactgaaagcaaa

SEQ ID NO: 172490 - DNA, 15 bp, Homo sapiens
gtactgaaagcaaat

SEQ ID NO: 172491 - DNA, 15 bp, Homo sapiens
tactgaaagcaaatg

SEQ ID NO: 172492 - DNA, 15 bp, Homo sapiens
actgaaagcaaatgc

SEQ ID NO: 172493 - DNA, 15 bp, Homo sapiens
ctgaaagcaaatgct

SEQ ID NO: 172494 - DNA, 15 bp, Homo sapiens
tgaaagcaaatgctt

SEQ ID NO: 172495 - DNA, 15 bp, Homo sapiens
gaaagcaaatgcttt

SEQ ID NO: 172496 - DNA, 15 bp, Homo sapiens
aaagcaaatgctttg

SEQ ID NO: 172497 - DNA, 15 bp, Homo sapiens
aagcaaatgctttgt

SEQ ID NO: 172498 - DNA, 15 bp, Homo sapiens
agcaaatgctttgtg

SEQ ID NO: 172499 - DNA, 15 bp, Homo sapiens
gcaaatgctttgtga

SEQ ID NO: 172500 - DNA, 15 bp, Homo sapiens
caaatgctttgtgac

SEQ ID NO: 172501 - DNA, 15 bp, Homo sapiens
aaatgctttgtgact

SEQ ID NO: 172502 - DNA, 15 bp, Homo sapiens
aatgctttgtgacta

SEQ ID NO: 172503 - DNA, 15 bp, Homo sapiens
atgctttgtgactat

SEQ ID NO: 172504 - DNA, 15 bp, Homo sapiens
tgctttgtgactatt

SEQ ID NO: 172505 - DNA, 15 bp, Homo sapiens
gctttgtgactatta

SEQ ID NO: 172506 - DNA, 15 bp, Homo sapiens
ctttgtgactattaa

SEQ ID NO: 172507 - DNA, 15 bp, Homo sapiens
tttgtgactattaaa

SEQ ID NO: 172508 - DNA, 15 bp, Homo sapiens
ttgtgactattaaat

SEQ ID NO: 172509 - DNA, 15 bp, Homo sapiens
tgtgactattaaatg

SEQ ID NO: 172510 - DNA, 15 bp, Homo sapiens
gtgactattaaatgt

SEQ ID NO: 172511 - DNA, 15 bp, Homo sapiens
tgactattaaatgtt

SEQ ID NO: 172512 - DNA, 15 bp, Homo sapiens
gactattaaatgttg

SEQ ID NO: 172513 - DNA, 15 bp, Homo sapiens
actattaaatgttgc

SEQ ID NO: 172514 - DNA, 15 bp, Homo sapiens
ctattaaatgttgca

SEQ ID NO: 172515 - DNA, 15 bp, Homo sapiens
tattaaatgttgcac

SEQ ID NO: 172516 - DNA, 15 bp, Homo sapiens
attaaatgttgcaca

SEQ ID NO: 172517 - DNA, 15 bp, Homo sapiens
ttaaatgttgcacat

SEQ ID NO: 172518 - DNA, 15 bp, Homo sapiens
taaatgttgcacatc

SEQ ID NO: 172519 - DNA, 15 bp, Homo sapiens
aaatgttgcacatca

SEQ ID NO: 172520 - DNA, 15 bp, Homo sapiens
aatgttgcacatcat

SEQ ID NO: 172521 - DNA, 15 bp, Homo sapiens
atgttgcacatcatt

SEQ ID NO: 172522 - DNA, 15 bp, Homo sapiens
tgttgcacatcattc

SEQ ID NO: 172523 - DNA, 15 bp, Homo sapiens
gttgcacatcattca

SEQ ID NO: 172524 - DNA, 15 bp, Homo sapiens
ttgcacatcattcat

SEQ ID NO: 172525 - DNA, 15 bp, Homo sapiens
tgcacatcattcatt

SEQ ID NO: 172526 - DNA, 15 bp, Homo sapiens
gcacatcattcattc

SEQ ID NO: 172527 - DNA, 15 bp, Homo sapiens
cacatcattcattca

SEQ ID NO: 172528 - DNA, 15 bp, Homo sapiens
acatcattcattcac

SEQ ID NO: 172529 - DNA, 15 bp, Homo sapiens
catcattcattcact

SEQ ID NO: 172530 - DNA, 15 bp, Homo sapiens
atcattcattcactg

SEQ ID NO: 172531 - DNA, 15 bp, Homo sapiens
tcattcattcactgt

SEQ ID NO: 172532 - DNA, 15 bp, Homo sapiens
cattcattcactgta

SEQ ID NO: 172533 - DNA, 15 bp, Homo sapiens
attcattcactgtat

SEQ ID NO: 172534 - DNA, 15 bp, Homo sapiens
ttcattcactgtata

SEQ ID NO: 172535 - DNA, 15 bp, Homo sapiens
tcattcactgtatag

SEQ ID NO: 172536 - DNA, 15 bp, Homo sapiens
cattcactgtatagt

SEQ ID NO: 172537 - DNA, 15 bp, Homo sapiens
attcactgtatagta

SEQ ID NO: 172538 - DNA, 15 bp, Homo sapiens
ttcactgtatagtaa

SEQ ID NO: 172539 - DNA, 15 bp, Homo sapiens
tcactgtatagtaat

SEQ ID NO: 172540 - DNA, 15 bp, Homo sapiens
cactgtatagtaatc

SEQ ID NO: 172541 - DNA, 15 bp, Homo sapiens
actgtatagtaatca

SEQ ID NO: 172542 - DNA, 15 bp, Homo sapiens
ctgtatagtaatcat

SEQ ID NO: 172543 - DNA, 15 bp, Homo sapiens
tgtatagtaatcatt

SEQ ID NO: 172544 - DNA, 15 bp, Homo sapiens
gtatagtaatcattg

SEQ ID NO: 172545 - DNA, 15 bp, Homo sapiens
tatagtaatcattga

SEQ ID NO: 172546 - DNA, 15 bp, Homo sapiens
atagtaatcattgac

SEQ ID NO: 172547 - DNA, 15 bp, Homo sapiens
tagtaatcattgact

SEQ ID NO: 172548 - DNA, 15 bp, Homo sapiens
agtaatcattgacta

SEQ ID NO: 172549 - DNA, 15 bp, Homo sapiens
gtaatcattgactaa

SEQ ID NO: 172550 - DNA, 15 bp, Homo sapiens
taatcattgactaaa

SEQ ID NO: 172551 - DNA, 15 bp, Homo sapiens
aatcattgactaaag

SEQ ID NO: 172552 - DNA, 15 bp, Homo sapiens
atcattgactaaagc

SEQ ID NO: 172553 - DNA, 15 bp, Homo sapiens
tcattgactaaagcc

SEQ ID NO: 172554 - DNA, 15 bp, Homo sapiens
cattgactaaagcca

SEQ ID NO: 172555 - DNA, 15 bp, Homo sapiens
attgactaaagccat

SEQ ID NO: 172556 - DNA, 15 bp, Homo sapiens
ttgactaaagccatt

SEQ ID NO: 172557 - DNA, 15 bp, Homo sapiens
tgactaaagccattt

SEQ ID NO: 172558 - DNA, 15 bp, Homo sapiens
gactaaagccatttg

SEQ ID NO: 172559 - DNA, 15 bp, Homo sapiens
actaaagccatttgt

SEQ ID NO: 172560 - DNA, 15 bp, Homo sapiens
ctaaagccatttgtc

SEQ ID NO: 172561 - DNA, 15 bp, Homo sapiens
taaagccatttgtct

SEQ ID NO: 172562 - DNA, 15 bp, Homo sapiens
aaagccatttgtctg

SEQ ID NO: 172563 - DNA, 15 bp, Homo sapiens
aagccatttgtctgt

SEQ ID NO: 172564 - DNA, 15 bp, Homo sapiens
agccatttgtctgtg

SEQ ID NO: 172565 - DNA, 15 bp, Homo sapiens
gccatttgtctgtgt

SEQ ID NO: 172566 - DNA, 15 bp, Homo sapiens
ccatttgtctgtgtt

SEQ ID NO: 172567 - DNA, 15 bp, Homo sapiens
catttgtctgtgttt

SEQ ID NO: 172568 - DNA, 15 bp, Homo sapiens
atttgtctgtgtttt

SEQ ID NO: 172569 - DNA, 15 bp, Homo sapiens
tttgtctgtgttttc

SEQ ID NO: 172570 - DNA, 15 bp, Homo sapiens
ttgtctgtgttttct

SEQ ID NO: 172571 - DNA, 15 bp, Homo sapiens
tgtctgtgttttctt

SEQ ID NO: 172572 - DNA, 15 bp, Homo sapiens
gtctgtgttttcttc

SEQ ID NO: 172573 - DNA, 15 bp, Homo sapiens
tctgtgttttcttct

SEQ ID NO: 172574 - DNA, 15 bp, Homo sapiens
ctgtgttttcttctt

SEQ ID NO: 172575 - DNA, 15 bp, Homo sapiens
tgtgttttcttcttg

SEQ ID NO: 172576 - DNA, 15 bp, Homo sapiens
gtgttttcttcttgt

SEQ ID NO: 172577 - DNA, 15 bp, Homo sapiens
tgttttcttcttgtg

SEQ ID NO: 172578 - DNA, 15 bp, Homo sapiens
gttttcttcttgtgg

SEQ ID NO: 172579 - DNA, 15 bp, Homo sapiens
ttttcttcttgtggt

SEQ ID NO: 172580 - DNA, 15 bp, Homo sapiens
tttcttcttgtggtt

SEQ ID NO: 172581 - DNA, 15 bp, Homo sapiens
ttcttcttgtggttg

SEQ ID NO: 172582 - DNA, 15 bp, Homo sapiens
tcttcttgtggttgt

SEQ ID NO: 172583 - DNA, 15 bp, Homo sapiens
cttcttgtggttgta

SEQ ID NO: 172584 - DNA, 15 bp, Homo sapiens
ttcttgtggttgtat

SEQ ID NO: 172585 - DNA, 15 bp, Homo sapiens
tcttgtggttgtata

SEQ ID NO: 172586 - DNA, 15 bp, Homo sapiens
cttgtggttgtatat

SEQ ID NO: 172587 - DNA, 15 bp, Homo sapiens
ttgtggttgtatata

SEQ ID NO: 172588 - DNA, 15 bp, Homo sapiens
tgtggttgtatatat

SEQ ID NO: 172589 - DNA, 15 bp, Homo sapiens
gtggttgtatatatc

SEQ ID NO: 172590 - DNA, 15 bp, Homo sapiens
tggttgtatatatca

SEQ ID NO: 172591 - DNA, 15 bp, Homo sapiens
ggttgtatatatcag

SEQ ID NO: 172592 - DNA, 15 bp, Homo sapiens
gttgtatatatcagg

SEQ ID NO: 172593 - DNA, 15 bp, Homo sapiens
ttgtatatatcaggt

SEQ ID NO: 172594 - DNA, 15 bp, Homo sapiens
tgtatatatcaggta

SEQ ID NO: 172595 - DNA, 15 bp, Homo sapiens
gtatatatcaggtaa

SEQ ID NO: 172596 - DNA, 15 bp, Homo sapiens
tatatatcaggtaaa

SEQ ID NO: 172597 - DNA, 15 bp, Homo sapiens
atatatcaggtaaaa

SEQ ID NO: 172598 - DNA, 15 bp, Homo sapiens
tatatcaggtaaaat

SEQ ID NO: 172599 - DNA, 15 bp, Homo sapiens
atatcaggtaaaata

SEQ ID NO: 172600 - DNA, 15 bp, Homo sapiens
tatcaggtaaaatat

SEQ ID NO: 172601 - DNA, 15 bp, Homo sapiens
atcaggtaaaatatt

SEQ ID NO: 172602 - DNA, 15 bp, Homo sapiens
tcaggtaaaatattt

SEQ ID NO: 172603 - DNA, 15 bp, Homo sapiens
caggtaaaatatttt

SEQ ID NO: 172604 - DNA, 15 bp, Homo sapiens
aggtaaaatattttc

SEQ ID NO: 172605 - DNA, 15 bp, Homo sapiens
ggtaaaatattttcc

SEQ ID NO: 172606 - DNA, 15 bp, Homo sapiens
gtaaaatattttcca

SEQ ID NO: 172607 - DNA, 15 bp, Homo sapiens
taaaatattttccaa

SEQ ID NO: 172608 - DNA, 15 bp, Homo sapiens
aaaatattttccaaa

SEQ ID NO: 172609 - DNA, 15 bp, Homo sapiens
aaatattttccaaag

SEQ ID NO: 172610 - DNA, 15 bp, Homo sapiens
aatattttccaaaga

SEQ ID NO: 172611 - DNA, 15 bp, Homo sapiens
atattttccaaagag

SEQ ID NO: 172612 - DNA, 15 bp, Homo sapiens
tattttccaaagagc

SEQ ID NO: 172613 - DNA, 15 bp, Homo sapiens
attttccaaagagcc

SEQ ID NO: 172614 - DNA, 15 bp, Homo sapiens
ttttccaaagagcca

SEQ ID NO: 172615 - DNA, 15 bp, Homo sapiens
tttccaaagagccat

SEQ ID NO: 172616 - DNA, 15 bp, Homo sapiens
ttccaaagagccatg

SEQ ID NO: 172617 - DNA, 15 bp, Homo sapiens
tccaaagagccatgt

SEQ ID NO: 172618 - DNA, 15 bp, Homo sapiens
ccaaagagccatgtg

SEQ ID NO: 172619 - DNA, 15 bp, Homo sapiens
caaagagccatgtgt

SEQ ID NO: 172620 - DNA, 15 bp, Homo sapiens
aaagagccatgtgtc

SEQ ID NO: 172621 - DNA, 15 bp, Homo sapiens
aagagccatgtgtca

SEQ ID NO: 172622 - DNA, 15 bp, Homo sapiens
agagccatgtgtcat

SEQ ID NO: 172623 - DNA, 15 bp, Homo sapiens
gagccatgtgtcatg

SEQ ID NO: 172624 - DNA, 15 bp, Homo sapiens
agccatgtgtcatgt

SEQ ID NO: 172625 - DNA, 15 bp, Homo sapiens
gccatgtgtcatgta

SEQ ID NO: 172626 - DNA, 15 bp, Homo sapiens
ccatgtgtcatgtaa

SEQ ID NO: 172627 - DNA, 15 bp, Homo sapiens
catgtgtcatgtaat

SEQ ID NO: 172628 - DNA, 15 bp, Homo sapiens
atgtgtcatgtaata

SEQ ID NO: 172629 - DNA, 15 bp, Homo sapiens
tgtgtcatgtaatac

SEQ ID NO: 172630 - DNA, 15 bp, Homo sapiens
gtgtcatgtaatact

SEQ ID NO: 172631 - DNA, 15 bp, Homo sapiens
tgtcatgtaatactg

SEQ ID NO: 172632 - DNA, 15 bp, Homo sapiens
gtcatgtaatactga

SEQ ID NO: 172633 - DNA, 15 bp, Homo sapiens
tcatgtaatactgaa

SEQ ID NO: 172634 - DNA, 15 bp, Homo sapiens
catgtaatactgaac

SEQ ID NO: 172635 - DNA, 15 bp, Homo sapiens
atgtaatactgaacc

SEQ ID NO: 172636 - DNA, 15 bp, Homo sapiens
tgtaatactgaacca

SEQ ID NO: 172637 - DNA, 15 bp, Homo sapiens
gtaatactgaaccac

SEQ ID NO: 172638 - DNA, 15 bp, Homo sapiens
taatactgaaccact

SEQ ID NO: 172639 - DNA, 15 bp, Homo sapiens
aatactgaaccactt

SEQ ID NO: 172640 - DNA, 15 bp, Homo sapiens
atactgaaccacttt

SEQ ID NO: 172641 - DNA, 15 bp, Homo sapiens
tactgaaccactttg

SEQ ID NO: 172642 - DNA, 15 bp, Homo sapiens
actgaaccactttga

SEQ ID NO: 172643 - DNA, 15 bp, Homo sapiens
ctgaaccactttgat

SEQ ID NO: 172644 - DNA, 15 bp, Homo sapiens
tgaaccactttgata

SEQ ID NO: 172645 - DNA, 15 bp, Homo sapiens
gaaccactttgatat

SEQ ID NO: 172646 - DNA, 15 bp, Homo sapiens
aaccactttgatatt

SEQ ID NO: 172647 - DNA, 15 bp, Homo sapiens
accactttgatattg

SEQ ID NO: 172648 - DNA, 15 bp, Homo sapiens
ccactttgatattga

SEQ ID NO: 172649 - DNA, 15 bp, Homo sapiens
cactttgatattgag

SEQ ID NO: 172650 - DNA, 15 bp, Homo sapiens
actttgatattgaga

SEQ ID NO: 172651 - DNA, 15 bp, Homo sapiens
ctttgatattgagac

SEQ ID NO: 172652 - DNA, 15 bp, Homo sapiens
tttgatattgagaca

SEQ ID NO: 172653 - DNA, 15 bp, Homo sapiens
ttgatattgagacat

SEQ ID NO: 172654 - DNA, 15 bp, Homo sapiens
tgatattgagacatt

SEQ ID NO: 172655 - DNA, 15 bp, Homo sapiens
gatattgagacatta

SEQ ID NO: 172656 - DNA, 15 bp, Homo sapiens
atattgagacattaa

SEQ ID NO: 172657 - DNA, 15 bp, Homo sapiens
tattgagacattaat

SEQ ID NO: 172658 - DNA, 15 bp, Homo sapiens
attgagacattaatt

SEQ ID NO: 172659 - DNA, 15 bp, Homo sapiens
ttgagacattaattt

SEQ ID NO: 172660 - DNA, 15 bp, Homo sapiens
tgagacattaatttg

SEQ ID NO: 172661 - DNA, 15 bp, Homo sapiens
gagacattaatttgt

SEQ ID NO: 172662 - DNA, 15 bp, Homo sapiens
agacattaatttgta

SEQ ID NO: 172663 - DNA, 15 bp, Homo sapiens
gacattaatttgtac

SEQ ID NO: 172664 - DNA, 15 bp, Homo sapiens
acattaatttgtacc

SEQ ID NO: 172665 - DNA, 15 bp, Homo sapiens
cattaatttgtaccc

SEQ ID NO: 172666 - DNA, 15 bp, Homo sapiens
attaatttgtaccct

SEQ ID NO: 172667 - DNA, 15 bp, Homo sapiens
ttaatttgtaccctt

SEQ ID NO: 172668 - DNA, 15 bp, Homo sapiens
taatttgtacccttg

SEQ ID NO: 172669 - DNA, 15 bp, Homo sapiens
aatttgtacccttgt

SEQ ID NO: 172670 - DNA, 15 bp, Homo sapiens
atttgtacccttgtt

SEQ ID NO: 172671 - DNA, 15 bp, Homo sapiens
tttgtacccttgtta

SEQ ID NO: 172672 - DNA, 15 bp, Homo sapiens
ttgtacccttgttat

SEQ ID NO: 172673 - DNA, 15 bp, Homo sapiens
tgtacccttgttatt

SEQ ID NO: 172674 - DNA, 15 bp, Homo sapiens
gtacccttgttatta

SEQ ID NO: 172675 - DNA, 15 bp, Homo sapiens
tacccttgttattat

SEQ ID NO: 172676 - DNA, 15 bp, Homo sapiens
acccttgttattatc

SEQ ID NO: 172677 - DNA, 15 bp, Homo sapiens
cccttgttattatct

SEQ ID NO: 172678 - DNA, 15 bp, Homo sapiens
ccttgttattatcta

SEQ ID NO: 172679 - DNA, 15 bp, Homo sapiens
cttgttattatctac

SEQ ID NO: 172680 - DNA, 15 bp, Homo sapiens
ttgttattatctact

SEQ ID NO: 172681 - DNA, 15 bp, Homo sapiens
tgttattatctacta

SEQ ID NO: 172682 - DNA, 15 bp, Homo sapiens
gttattatctactag

SEQ ID NO: 172683 - DNA, 15 bp, Homo sapiens
ttattatctactagt

SEQ ID NO: 172684 - DNA, 15 bp, Homo sapiens
tattatctactagta

SEQ ID NO: 172685 - DNA, 15 bp, Homo sapiens
attatctactagtaa

SEQ ID NO: 172686 - DNA, 15 bp, Homo sapiens
ttatctactagtaat

SEQ ID NO: 172687 - DNA, 15 bp, Homo sapiens
tatctactagtaata

SEQ ID NO: 172688 - DNA, 15 bp, Homo sapiens
atctactagtaataa

SEQ ID NO: 172689 - DNA, 15 bp, Homo sapiens
tctactagtaataat

SEQ ID NO: 172690 - DNA, 15 bp, Homo sapiens
ctactagtaataatg

SEQ ID NO: 172691 - DNA, 15 bp, Homo sapiens
tactagtaataatgt

SEQ ID NO: 172692 - DNA, 15 bp, Homo sapiens
actagtaataatgta

SEQ ID NO: 172693 - DNA, 15 bp, Homo sapiens
ctagtaataatgtaa

SEQ ID NO: 172694 - DNA, 15 bp, Homo sapiens
tagtaataatgtaat

SEQ ID NO: 172695 - DNA, 15 bp, Homo sapiens
agtaataatgtaata

SEQ ID NO: 172696 - DNA, 15 bp, Homo sapiens
gtaataatgtaatac

SEQ ID NO: 172697 - DNA, 15 bp, Homo sapiens
taataatgtaatact

SEQ ID NO: 172698 - DNA, 15 bp, Homo sapiens
aataatgtaatactg

SEQ ID NO: 172699 - DNA, 15 bp, Homo sapiens
ataatgtaatactgt

SEQ ID NO: 172700 - DNA, 15 bp, Homo sapiens
taatgtaatactgta

SEQ ID NO: 172701 - DNA, 15 bp, Homo sapiens
aatgtaatactgtag

SEQ ID NO: 172702 - DNA, 15 bp, Homo sapiens
atgtaatactgtaga

SEQ ID NO: 172703 - DNA, 15 bp, Homo sapiens
tgtaatactgtagaa

SEQ ID NO: 172704 - DNA, 15 bp, Homo sapiens
gtaatactgtagaaa

SEQ ID NO: 172705 - DNA, 15 bp, Homo sapiens
taatactgtagaaat

SEQ ID NO: 172706 - DNA, 15 bp, Homo sapiens
aatactgtagaaata

SEQ ID NO: 172707 - DNA, 15 bp, Homo sapiens
atactgtagaaatat

SEQ ID NO: 172708 - DNA, 15 bp, Homo sapiens
tactgtagaaatatt

SEQ ID NO: 172709 - DNA, 15 bp, Homo sapiens
actgtagaaatattg

SEQ ID NO: 172710 - DNA, 15 bp, Homo sapiens
ctgtagaaatattgc

SEQ ID NO: 172711 - DNA, 15 bp, Homo sapiens
tgtagaaatattgct

SEQ ID NO: 172712 - DNA, 15 bp, Homo sapiens
gtagaaatattgctc

SEQ ID NO: 172713 - DNA, 15 bp, Homo sapiens
tagaaatattgctct

SEQ ID NO: 172714 - DNA, 15 bp, Homo sapiens
agaaatattgctcta

SEQ ID NO: 172715 - DNA, 15 bp, Homo sapiens
gaaatattgctctaa

SEQ ID NO: 172716 - DNA, 15 bp, Homo sapiens
aaatattgctctaat

SEQ ID NO: 172717 - DNA, 15 bp, Homo sapiens
aatattgctctaatt

SEQ ID NO: 172718 - DNA, 15 bp, Homo sapiens
atattgctctaattc

SEQ ID NO: 172719 - DNA, 15 bp, Homo sapiens
tattgctctaattct

SEQ ID NO: 172720 - DNA, 15 bp, Homo sapiens
attgctctaattctt

SEQ ID NO: 172721 - DNA, 15 bp, Homo sapiens
ttgctctaattcttt

SEQ ID NO: 172722 - DNA, 15 bp, Homo sapiens
tgctctaattctttt

SEQ ID NO: 172723 - DNA, 15 bp, Homo sapiens
gctctaattcttttc

SEQ ID NO: 172724 - DNA, 15 bp, Homo sapiens
ctctaattcttttca

SEQ ID NO: 172725 - DNA, 15 bp, Homo sapiens
tctaattcttttcaa

SEQ ID NO: 172726 - DNA, 15 bp, Homo sapiens
ctaattcttttcaaa

SEQ ID NO: 172727 - DNA, 15 bp, Homo sapiens
taattcttttcaaaa

SEQ ID NO: 172728 - DNA, 15 bp, Homo sapiens
aattcttttcaaaat

SEQ ID NO: 172729 - DNA, 15 bp, Homo sapiens
attcttttcaaaatt

SEQ ID NO: 172730 - DNA, 15 bp, Homo sapiens
ttcttttcaaaattg

SEQ ID NO: 172731 - DNA, 15 bp, Homo sapiens
tcttttcaaaattgt

SEQ ID NO: 172732 - DNA, 15 bp, Homo sapiens
cttttcaaaattgtt

SEQ ID NO: 172733 - DNA, 15 bp, Homo sapiens
ttttcaaaattgttg

SEQ ID NO: 172734 - DNA, 15 bp, Homo sapiens
tttcaaaattgttgc

SEQ ID NO: 172735 - DNA, 15 bp, Homo sapiens
ttcaaaattgttgca

SEQ ID NO: 172736 - DNA, 15 bp, Homo sapiens
tcaaaattgttgcat

SEQ ID NO: 172737 - DNA, 15 bp, Homo sapiens
caaaattgttgcatc

SEQ ID NO: 172738 - DNA, 15 bp, Homo sapiens
aaaattgttgcatcc

SEQ ID NO: 172739 - DNA, 15 bp, Homo sapiens
aaattgttgcatccc

SEQ ID NO: 172740 - DNA, 15 bp, Homo sapiens
aattgttgcatcccc

SEQ ID NO: 172741 - DNA, 15 bp, Homo sapiens
attgttgcatccccc

SEQ ID NO: 172742 - DNA, 15 bp, Homo sapiens
ttgttgcatccccct

SEQ ID NO: 172743 - DNA, 15 bp, Homo sapiens
tgttgcatccccctt

SEQ ID NO: 172744 - DNA, 15 bp, Homo sapiens
gttgcatccccctta

SEQ ID NO: 172745 - DNA, 15 bp, Homo sapiens
ttgcatcccccttag

SEQ ID NO: 172746 - DNA, 15 bp, Homo sapiens
tgcatcccccttaga

SEQ ID NO: 172747 - DNA, 15 bp, Homo sapiens
gcatcccccttagaa

SEQ ID NO: 172748 - DNA, 15 bp, Homo sapiens
catcccccttagaat

SEQ ID NO: 172749 - DNA, 15 bp, Homo sapiens
atcccccttagaatg

SEQ ID NO: 172750 - DNA, 15 bp, Homo sapiens
tcccccttagaatgt

SEQ ID NO: 172751 - DNA, 15 bp, Homo sapiens
cccccttagaatgtt

SEQ ID NO: 172752 - DNA, 15 bp, Homo sapiens
ccccttagaatgttt

SEQ ID NO: 172753 - DNA, 15 bp, Homo sapiens
cccttagaatgtttc

SEQ ID NO: 172754 - DNA, 15 bp, Homo sapiens
ccttagaatgtttct

SEQ ID NO: 172755 - DNA, 15 bp, Homo sapiens
cttagaatgtttcta

SEQ ID NO: 172756 - DNA, 15 bp, Homo sapiens
ttagaatgtttctat

SEQ ID NO: 172757 - DNA, 15 bp, Homo sapiens
tagaatgtttctatt

SEQ ID NO: 172758 - DNA, 15 bp, Homo sapiens
agaatgtttctattt

SEQ ID NO: 172759 - DNA, 15 bp, Homo sapiens
gaatgtttctatttc

SEQ ID NO: 172760 - DNA, 15 bp, Homo sapiens
aatgtttctatttcc

SEQ ID NO: 172761 - DNA, 15 bp, Homo sapiens
atgtttctatttcca

SEQ ID NO: 172762 - DNA, 15 bp, Homo sapiens
tgtttctatttccat

SEQ ID NO: 172763 - DNA, 15 bp, Homo sapiens
gtttctatttccata

SEQ ID NO: 172764 - DNA, 15 bp, Homo sapiens
tttctatttccataa

SEQ ID NO: 172765 - DNA, 15 bp, Homo sapiens
ttctatttccataag

SEQ ID NO: 172766 - DNA, 15 bp, Homo sapiens
tctatttccataagg

SEQ ID NO: 172767 - DNA, 15 bp, Homo sapiens
ctatttccataagga

SEQ ID NO: 172768 - DNA, 15 bp, Homo sapiens
tatttccataaggat

SEQ ID NO: 172769 - DNA, 15 bp, Homo sapiens
atttccataaggatt

SEQ ID NO: 172770 - DNA, 15 bp, Homo sapiens
tttccataaggattt

SEQ ID NO: 172771 - DNA, 15 bp, Homo sapiens
ttccataaggattta

SEQ ID NO: 172772 - DNA, 15 bp, Homo sapiens
tccataaggatttag

SEQ ID NO: 172773 - DNA, 15 bp, Homo sapiens
ccataaggatttagg

SEQ ID NO: 172774 - DNA, 15 bp, Homo sapiens
cataaggatttaggt

SEQ ID NO: 172775 - DNA, 15 bp, Homo sapiens
ataaggatttaggta

SEQ ID NO: 172776 - DNA, 15 bp, Homo sapiens
taaggatttaggtat

SEQ ID NO: 172777 - DNA, 15 bp, Homo sapiens
aaggatttaggtatg

SEQ ID NO: 172778 - DNA, 15 bp, Homo sapiens
aggatttaggtatgc

SEQ ID NO: 172779 - DNA, 15 bp, Homo sapiens
ggatttaggtatgct

SEQ ID NO: 172780 - DNA, 15 bp, Homo sapiens
gatttaggtatgcta

SEQ ID NO: 172781 - DNA, 15 bp, Homo sapiens
atttaggtatgctat

SEQ ID NO: 172782 - DNA, 15 bp, Homo sapiens
tttaggtatgctatt

SEQ ID NO: 172783 - DNA, 15 bp, Homo sapiens
ttaggtatgctatta

SEQ ID NO: 172784 - DNA, 15 bp, Homo sapiens
taggtatgctattat

SEQ ID NO: 172785 - DNA, 15 bp, Homo sapiens
aggtatgctattatc

SEQ ID NO: 172786 - DNA, 15 bp, Homo sapiens
ggtatgctattatcc

SEQ ID NO: 172787 - DNA, 15 bp, Homo sapiens
gtatgctattatccc

SEQ ID NO: 172788 - DNA, 15 bp, Homo sapiens
tatgctattatccct

SEQ ID NO: 172789 - DNA, 15 bp, Homo sapiens
atgctattatccctt

SEQ ID NO: 172790 - DNA, 15 bp, Homo sapiens
tgctattatcccttc

SEQ ID NO: 172791 - DNA, 15 bp, Homo sapiens
gctattatcccttct

SEQ ID NO: 172792 - DNA, 15 bp, Homo sapiens
ctattatcccttctt

SEQ ID NO: 172793 - DNA, 15 bp, Homo sapiens
tattatcccttctta

SEQ ID NO: 172794 - DNA, 15 bp, Homo sapiens
attatcccttcttat

SEQ ID NO: 172795 - DNA, 15 bp, Homo sapiens
ttatcccttcttata

SEQ ID NO: 172796 - DNA, 15 bp, Homo sapiens
tatcccttcttatac

SEQ ID NO: 172797 - DNA, 15 bp, Homo sapiens
atcccttcttatacc

SEQ ID NO: 172798 - DNA, 15 bp, Homo sapiens
tcccttcttataccc

SEQ ID NO: 172799 - DNA, 15 bp, Homo sapiens
cccttcttataccct

SEQ ID NO: 172800 - DNA, 15 bp, Homo sapiens
ccttcttatacccta

SEQ ID NO: 172801 - DNA, 15 bp, Homo sapiens
cttcttataccctaa

SEQ ID NO: 172802 - DNA, 15 bp, Homo sapiens
ttcttataccctaag

SEQ ID NO: 172803 - DNA, 15 bp, Homo sapiens
tcttataccctaaga

SEQ ID NO: 172804 - DNA, 15 bp, Homo sapiens
cttataccctaagat

SEQ ID NO: 172805 - DNA, 15 bp, Homo sapiens
ttataccctaagatg

SEQ ID NO: 172806 - DNA, 15 bp, Homo sapiens
tataccctaagatga

SEQ ID NO: 172807 - DNA, 15 bp, Homo sapiens
ataccctaagatgaa

SEQ ID NO: 172808 - DNA, 15 bp, Homo sapiens
taccctaagatgaag

SEQ ID NO: 172809 - DNA, 15 bp, Homo sapiens
accctaagatgaagc

SEQ ID NO: 172810 - DNA, 15 bp, Homo sapiens
ccctaagatgaagct

SEQ ID NO: 172811 - DNA, 15 bp, Homo sapiens
cctaagatgaagctg

SEQ ID NO: 172812 - DNA, 15 bp, Homo sapiens
ctaagatgaagctgt

SEQ ID NO: 172813 - DNA, 15 bp, Homo sapiens
taagatgaagctgtt

SEQ ID NO: 172814 - DNA, 15 bp, Homo sapiens
aagatgaagctgttt

SEQ ID NO: 172815 - DNA, 15 bp, Homo sapiens
agatgaagctgtttt

SEQ ID NO: 172816 - DNA, 15 bp, Homo sapiens
gatgaagctgttttt

SEQ ID NO: 172817 - DNA, 15 bp, Homo sapiens
atgaagctgtttttg

SEQ ID NO: 172818 - DNA, 15 bp, Homo sapiens
tgaagctgtttttgt

SEQ ID NO: 172819 - DNA, 15 bp, Homo sapiens
gaagctgtttttgtg

SEQ ID NO: 172820 - DNA, 15 bp, Homo sapiens
aagctgtttttgtgc

SEQ ID NO: 172821 - DNA, 15 bp, Homo sapiens
agctgtttttgtgct

SEQ ID NO: 172822 - DNA, 15 bp, Homo sapiens
gctgtttttgtgctc

SEQ ID NO: 172823 - DNA, 15 bp, Homo sapiens
ctgtttttgtgctct

SEQ ID NO: 172824 - DNA, 15 bp, Homo sapiens
tgtttttgtgctctt

SEQ ID NO: 172825 - DNA, 15 bp, Homo sapiens
gtttttgtgctcttt

SEQ ID NO: 172826 - DNA, 15 bp, Homo sapiens
tttttgtgctctttg

SEQ ID NO: 172827 - DNA, 15 bp, Homo sapiens
ttttgtgctctttgt

SEQ ID NO: 172828 - DNA, 15 bp, Homo sapiens
tttgtgctctttgtt

SEQ ID NO: 172829 - DNA, 15 bp, Homo sapiens
ttgtgctctttgttc

SEQ ID NO: 172830 - DNA, 15 bp, Homo sapiens
tgtgctctttgttca

SEQ ID NO: 172831 - DNA, 15 bp, Homo sapiens
gtgctctttgttcat

SEQ ID NO: 172832 - DNA, 15 bp, Homo sapiens
tgctctttgttcatc

SEQ ID NO: 172833 - DNA, 15 bp, Homo sapiens
gctctttgttcatca

SEQ ID NO: 172834 - DNA, 15 bp, Homo sapiens
ctctttgttcatcat

SEQ ID NO: 172835 - DNA, 15 bp, Homo sapiens
tctttgttcatcatt

SEQ ID NO: 172836 - DNA, 15 bp, Homo sapiens
ctttgttcatcattg

SEQ ID NO: 172837 - DNA, 15 bp, Homo sapiens
tttgttcatcattgg

SEQ ID NO: 172838 - DNA, 15 bp, Homo sapiens
ttgttcatcattggc

SEQ ID NO: 172839 - DNA, 15 bp, Homo sapiens
tgttcatcattggcc

SEQ ID NO: 172840 - DNA, 15 bp, Homo sapiens
gttcatcattggccc

SEQ ID NO: 172841 - DNA, 15 bp, Homo sapiens
ttcatcattggccct

SEQ ID NO: 172842 - DNA, 15 bp, Homo sapiens
tcatcattggccctc

SEQ ID NO: 172843 - DNA, 15 bp, Homo sapiens
catcattggccctca

SEQ ID NO: 172844 - DNA, 15 bp, Homo sapiens
atcattggccctcat

SEQ ID NO: 172845 - DNA, 15 bp, Homo sapiens
tcattggccctcatt

SEQ ID NO: 172846 - DNA, 15 bp, Homo sapiens
cattggccctcattc

SEQ ID NO: 172847 - DNA, 15 bp, Homo sapiens
attggccctcattcc

SEQ ID NO: 172848 - DNA, 15 bp, Homo sapiens
ttggccctcattcca

SEQ ID NO: 172849 - DNA, 15 bp, Homo sapiens
tggccctcattccaa

SEQ ID NO: 172850 - DNA, 15 bp, Homo sapiens
ggccctcattccaag

SEQ ID NO: 172851 - DNA, 15 bp, Homo sapiens
gccctcattccaagc

SEQ ID NO: 172852 - DNA, 15 bp, Homo sapiens
ccctcattccaagca

SEQ ID NO: 172853 - DNA, 15 bp, Homo sapiens
cctcattccaagcac

SEQ ID NO: 172854 - DNA, 15 bp, Homo sapiens
ctcattccaagcact

SEQ ID NO: 172855 - DNA, 15 bp, Homo sapiens
tcattccaagcactt

SEQ ID NO: 172856 - DNA, 15 bp, Homo sapiens
cattccaagcacttt

SEQ ID NO: 172857 - DNA, 15 bp, Homo sapiens
attccaagcacttta

SEQ ID NO: 172858 - DNA, 15 bp, Homo sapiens
ttccaagcactttac

SEQ ID NO: 172859 - DNA, 15 bp, Homo sapiens
tccaagcactttacg

SEQ ID NO: 172860 - DNA, 15 bp, Homo sapiens
ccaagcactttacgc

SEQ ID NO: 172861 - DNA, 15 bp, Homo sapiens
caagcactttacgct

SEQ ID NO: 172862 - DNA, 15 bp, Homo sapiens
aagcactttacgctg

SEQ ID NO: 172863 - DNA, 15 bp, Homo sapiens
agcactttacgctgt

SEQ ID NO: 172864 - DNA, 15 bp, Homo sapiens
gcactttacgctgtc

SEQ ID NO: 172865 - DNA, 15 bp, Homo sapiens
cactttacgctgtct

SEQ ID NO: 172866 - DNA, 15 bp, Homo sapiens
actttacgctgtctg

SEQ ID NO: 172867 - DNA, 15 bp, Homo sapiens
ctttacgctgtctgt

SEQ ID NO: 172868 - DNA, 15 bp, Homo sapiens
tttacgctgtctgta

SEQ ID NO: 172869 - DNA, 15 bp, Homo sapiens
ttacgctgtctgtaa

SEQ ID NO: 172870 - DNA, 15 bp, Homo sapiens
tacgctgtctgtaat

SEQ ID NO: 172871 - DNA, 15 bp, Homo sapiens
acgctgtctgtaatg

SEQ ID NO: 172872 - DNA, 15 bp, Homo sapiens
cgctgtctgtaatgg

SEQ ID NO: 172873 - DNA, 15 bp, Homo sapiens
gctgtctgtaatggg

SEQ ID NO: 172874 - DNA, 15 bp, Homo sapiens
ctgtctgtaatggga

SEQ ID NO: 172875 - DNA, 15 bp, Homo sapiens
tgtctgtaatgggat

SEQ ID NO: 172876 - DNA, 15 bp, Homo sapiens
gtctgtaatgggatc

SEQ ID NO: 172877 - DNA, 15 bp, Homo sapiens
tctgtaatgggatct

SEQ ID NO: 172878 - DNA, 15 bp, Homo sapiens
ctgtaatgggatcta

SEQ ID NO: 172879 - DNA, 15 bp, Homo sapiens
tgtaatgggatctat

SEQ ID NO: 172880 - DNA, 15 bp, Homo sapiens
gtaatgggatctatt

SEQ ID NO: 172881 - DNA, 15 bp, Homo sapiens
taatgggatctattt

SEQ ID NO: 172882 - DNA, 15 bp, Homo sapiens
aatgggatctatttt

SEQ ID NO: 172883 - DNA, 15 bp, Homo sapiens
atgggatctattttt

SEQ ID NO: 172884 - DNA, 15 bp, Homo sapiens
tgggatctatttttg

SEQ ID NO: 172885 - DNA, 15 bp, Homo sapiens
gggatctatttttgc

SEQ ID NO: 172886 - DNA, 15 bp, Homo sapiens
ggatctatttttgca

SEQ ID NO: 172887 - DNA, 15 bp, Homo sapiens
gatctatttttgcac

SEQ ID NO: 172888 - DNA, 15 bp, Homo sapiens
atctatttttgcact

SEQ ID NO: 172889 - DNA, 15 bp, Homo sapiens
tctatttttgcactg

SEQ ID NO: 172890 - DNA, 15 bp, Homo sapiens
ctatttttgcactgg

SEQ ID NO: 172891 - DNA, 15 bp, Homo sapiens
tatttttgcactgga

SEQ ID NO: 172892 - DNA, 15 bp, Homo sapiens
atttttgcactggaa

SEQ ID NO: 172893 - DNA, 15 bp, Homo sapiens
tttttgcactggaat

SEQ ID NO: 172894 - DNA, 15 bp, Homo sapiens
ttttgcactggaata

SEQ ID NO: 172895 - DNA, 15 bp, Homo sapiens
tttgcactggaatat

SEQ ID NO: 172896 - DNA, 15 bp, Homo sapiens
ttgcactggaatatc

SEQ ID NO: 172897 - DNA, 15 bp, Homo sapiens
tgcactggaatatct

SEQ ID NO: 172898 - DNA, 15 bp, Homo sapiens
gcactggaatatctg

SEQ ID NO: 172899 - DNA, 15 bp, Homo sapiens
cactggaatatctga

SEQ ID NO: 172900 - DNA, 15 bp, Homo sapiens
actggaatatctgag

SEQ ID NO: 172901 - DNA, 15 bp, Homo sapiens
ctggaatatctgaga

SEQ ID NO: 172902 - DNA, 15 bp, Homo sapiens
tggaatatctgagaa

SEQ ID NO: 172903 - DNA, 15 bp, Homo sapiens
ggaatatctgagaat

SEQ ID NO: 172904 - DNA, 15 bp, Homo sapiens
gaatatctgagaatt

SEQ ID NO: 172905 - DNA, 15 bp, Homo sapiens
aatatctgagaattg

SEQ ID NO: 172906 - DNA, 15 bp, Homo sapiens
atatctgagaattgc

SEQ ID NO: 172907 - DNA, 15 bp, Homo sapiens
tatctgagaattgca

SEQ ID NO: 172908 - DNA, 15 bp, Homo sapiens
atctgagaattgcaa

SEQ ID NO: 172909 - DNA, 15 bp, Homo sapiens
tctgagaattgcaaa

SEQ ID NO: 172910 - DNA, 15 bp, Homo sapiens
ctgagaattgcaaaa

SEQ ID NO: 172911 - DNA, 15 bp, Homo sapiens
tgagaattgcaaaac

SEQ ID NO: 172912 - DNA, 15 bp, Homo sapiens
gagaattgcaaaact

SEQ ID NO: 172913 - DNA, 15 bp, Homo sapiens
agaattgcaaaacta

SEQ ID NO: 172914 - DNA, 15 bp, Homo sapiens
gaattgcaaaactag

SEQ ID NO: 172915 - DNA, 15 bp, Homo sapiens
aattgcaaaactaga

SEQ ID NO: 172916 - DNA, 15 bp, Homo sapiens
attgcaaaactagac

SEQ ID NO: 172917 - DNA, 15 bp, Homo sapiens
ttgcaaaactagaca

SEQ ID NO: 172918 - DNA, 15 bp, Homo sapiens
tgcaaaactagacaa

SEQ ID NO: 172919 - DNA, 15 bp, Homo sapiens
gcaaaactagacaaa

SEQ ID NO: 172920 - DNA, 15 bp, Homo sapiens
caaaactagacaaaa

SEQ ID NO: 172921 - DNA, 15 bp, Homo sapiens
aaaactagacaaaag

SEQ ID NO: 172922 - DNA, 15 bp, Homo sapiens
aaactagacaaaagt

SEQ ID NO: 172923 - DNA, 15 bp, Homo sapiens
aactagacaaaagtt

SEQ ID NO: 172924 - DNA, 15 bp, Homo sapiens
actagacaaaagttt

SEQ ID NO: 172925 - DNA, 15 bp, Homo sapiens
ctagacaaaagtttc

SEQ ID NO: 172926 - DNA, 15 bp, Homo sapiens
tagacaaaagtttca

SEQ ID NO: 172927 - DNA, 15 bp, Homo sapiens
agacaaaagtttcac

SEQ ID NO: 172928 - DNA, 15 bp, Homo sapiens
gacaaaagtttcaca

SEQ ID NO: 172929 - DNA, 15 bp, Homo sapiens
acaaaagtttcacaa

SEQ ID NO: 172930 - DNA, 15 bp, Homo sapiens
caaaagtttcacaac

SEQ ID NO: 172931 - DNA, 15 bp, Homo sapiens
aaaagtttcacaaca

SEQ ID NO: 172932 - DNA, 15 bp, Homo sapiens
aaagtttcacaacag

SEQ ID NO: 172933 - DNA, 15 bp, Homo sapiens
aagtttcacaacaga

SEQ ID NO: 172934 - DNA, 15 bp, Homo sapiens
agtttcacaacagat

SEQ ID NO: 172935 - DNA, 15 bp, Homo sapiens
gtttcacaacagatt

SEQ ID NO: 172936 - DNA, 15 bp, Homo sapiens
tttcacaacagattt

SEQ ID NO: 172937 - DNA, 15 bp, Homo sapiens
ttcacaacagatttc

SEQ ID NO: 172938 - DNA, 15 bp, Homo sapiens
tcacaacagatttct

SEQ ID NO: 172939 - DNA, 15 bp, Homo sapiens
cacaacagatttcta

SEQ ID NO: 172940 - DNA, 15 bp, Homo sapiens
acaacagatttctaa

SEQ ID NO: 172941 - DNA, 15 bp, Homo sapiens
caacagatttctaag

SEQ ID NO: 172942 - DNA, 15 bp, Homo sapiens
aacagatttctaagt

SEQ ID NO: 172943 - DNA, 15 bp, Homo sapiens
acagatttctaagtt

SEQ ID NO: 172944 - DNA, 15 bp, Homo sapiens
cagatttctaagtta

SEQ ID NO: 172945 - DNA, 15 bp, Homo sapiens
agatttctaagttaa

SEQ ID NO: 172946 - DNA, 15 bp, Homo sapiens
gatttctaagttaaa

SEQ ID NO: 172947 - DNA, 15 bp, Homo sapiens
atttctaagttaaat

SEQ ID NO: 172948 - DNA, 15 bp, Homo sapiens
tttctaagttaaatc

SEQ ID NO: 172949 - DNA, 15 bp, Homo sapiens
ttctaagttaaatca

SEQ ID NO: 172950 - DNA, 15 bp, Homo sapiens
tctaagttaaatcat

SEQ ID NO: 172951 - DNA, 15 bp, Homo sapiens
ctaagttaaatcatt

SEQ ID NO: 172952 - DNA, 15 bp, Homo sapiens
taagttaaatcattt

SEQ ID NO: 172953 - DNA, 15 bp, Homo sapiens
aagttaaatcatttt

SEQ ID NO: 172954 - DNA, 15 bp, Homo sapiens
agttaaatcattttc

SEQ ID NO: 172955 - DNA, 15 bp, Homo sapiens
gttaaatcattttca

SEQ ID NO: 172956 - DNA, 15 bp, Homo sapiens
ttaaatcattttcat

SEQ ID NO: 172957 - DNA, 15 bp, Homo sapiens
taaatcattttcatt

SEQ ID NO: 172958 - DNA, 15 bp, Homo sapiens
aaatcattttcatta

SEQ ID NO: 172959 - DNA, 15 bp, Homo sapiens
aatcattttcattaa

SEQ ID NO: 172960 - DNA, 15 bp, Homo sapiens
atcattttcattaaa

SEQ ID NO: 172961 - DNA, 15 bp, Homo sapiens
tcattttcattaaaa

SEQ ID NO: 172962 - DNA, 15 bp, Homo sapiens
cattttcattaaaag

SEQ ID NO: 172963 - DNA, 15 bp, Homo sapiens
attttcattaaaagg

SEQ ID NO: 172964 - DNA, 15 bp, Homo sapiens
ttttcattaaaagga

SEQ ID NO: 172965 - DNA, 15 bp, Homo sapiens
tttcattaaaaggaa

SEQ ID NO: 172966 - DNA, 15 bp, Homo sapiens
ttcattaaaaggaaa

SEQ ID NO: 172967 - DNA, 15 bp, Homo sapiens
tcattaaaaggaaaa

SEQ ID NO: 172968 - DNA, 15 bp, Homo sapiens
cattaaaaggaaaaa

SEQ ID NO: 172969 - DNA, 15 bp, Homo sapiens
attaaaaggaaaaaa

SEQ ID NO: 172970 - DNA, 15 bp, Homo sapiens
ttaaaaggaaaaaag

SEQ ID NO: 172971 - DNA, 15 bp, Homo sapiens
taaaaggaaaaaaga

SEQ ID NO: 172972 - DNA, 15 bp, Homo sapiens
aaaaggaaaaaagaa

SEQ ID NO: 172973 - DNA, 15 bp, Homo sapiens
aaaggaaaaaagaaa

SEQ ID NO: 172974 - DNA, 15 bp, Homo sapiens
aaggaaaaaagaaaa

SEQ ID NO: 172975 - DNA, 15 bp, Homo sapiens
aggaaaaaagaaaaa

SEQ ID NO: 172976 - DNA, 15 bp, Homo sapiens
ggaaaaaagaaaaaa

SEQ ID NO: 172977 - DNA, 15 bp, Homo sapiens
aaaaagaaaaaaaat

SEQ ID NO: 172978 - DNA, 15 bp, Homo sapiens
aaaagaaaaaaaatt

SEQ ID NO: 172979 - DNA, 15 bp, Homo sapiens
aaagaaaaaaaattt

SEQ ID NO: 172980 - DNA, 15 bp, Homo sapiens
aagaaaaaaaatttt

SEQ ID NO: 172981 - DNA, 15 bp, Homo sapiens
agaaaaaaaattttg

SEQ ID NO: 172982 - DNA, 15 bp, Homo sapiens
gaaaaaaaattttgt

SEQ ID NO: 172983 - DNA, 15 bp, Homo sapiens
aaaaaaaattttgta

SEQ ID NO: 172984 - DNA, 15 bp, Homo sapiens
aaaaaaattttgtat

SEQ ID NO: 172985 - DNA, 15 bp, Homo sapiens
aaaaaattttgtatg

SEQ ID NO: 172986 - DNA, 15 bp, Homo sapiens
aaaaattttgtatgt

SEQ ID NO: 172987 - DNA, 15 bp, Homo sapiens
aaaattttgtatgtc

SEQ ID NO: 172988 - DNA, 15 bp, Homo sapiens
aaattttgtatgtca

SEQ ID NO: 172989 - DNA, 15 bp, Homo sapiens
aattttgtatgtcaa

SEQ ID NO: 172990 - DNA, 15 bp, Homo sapiens
attttgtatgtcaat

SEQ ID NO: 172991 - DNA, 15 bp, Homo sapiens
ttttgtatgtcaata

SEQ ID NO: 172992 - DNA, 15 bp, Homo sapiens
tttgtatgtcaataa

SEQ ID NO: 172993 - DNA, 15 bp, Homo sapiens
ttgtatgtcaataac

SEQ ID NO: 172994 - DNA, 15 bp, Homo sapiens
tgtatgtcaataact

SEQ ID NO: 172995 - DNA, 15 bp, Homo sapiens
gtatgtcaataactt

SEQ ID NO: 172996 - DNA, 15 bp, Homo sapiens
tatgtcaataacttt

SEQ ID NO: 172997 - DNA, 15 bp, Homo sapiens
atgtcaataacttta

SEQ ID NO: 172998 - DNA, 15 bp, Homo sapiens
tgtcaataactttat

SEQ ID NO: 172999 - DNA, 15 bp, Homo sapiens
gtcaataactttata

SEQ ID NO: 173000 - DNA, 15 bp, Homo sapiens
tcaataactttatat

SEQ ID NO: 173001 - DNA, 15 bp, Homo sapiens
caataactttatatg

SEQ ID NO: 173002 - DNA, 15 bp, Homo sapiens
aataactttatatga

SEQ ID NO: 173003 - DNA, 15 bp, Homo sapiens
ataactttatatgaa

SEQ ID NO: 173004 - DNA, 15 bp, Homo sapiens
taactttatatgaag

SEQ ID NO: 173005 - DNA, 15 bp, Homo sapiens
aactttatatgaagt

SEQ ID NO: 173006 - DNA, 15 bp, Homo sapiens
actttatatgaagta

SEQ ID NO: 173007 - DNA, 15 bp, Homo sapiens
ctttatatgaagtat

SEQ ID NO: 173008 - DNA, 15 bp, Homo sapiens
tttatatgaagtatt

SEQ ID NO: 173009 - DNA, 15 bp, Homo sapiens
ttatatgaagtatta

SEQ ID NO: 173010 - DNA, 15 bp, Homo sapiens
tatatgaagtattaa

SEQ ID NO: 173011 - DNA, 15 bp, Homo sapiens
atatgaagtattaaa

SEQ ID NO: 173012 - DNA, 15 bp, Homo sapiens
tatgaagtattaaaa

SEQ ID NO: 173013 - DNA, 15 bp, Homo sapiens
atgaagtattaaaat

SEQ ID NO: 173014 - DNA, 15 bp, Homo sapiens
tgaagtattaaaatg

SEQ ID NO: 173015 - DNA, 15 bp, Homo sapiens
gaagtattaaaatgc

SEQ ID NO: 173016 - DNA, 15 bp, Homo sapiens
aagtattaaaatgca

SEQ ID NO: 173017 - DNA, 15 bp, Homo sapiens
agtattaaaatgcat

SEQ ID NO: 173018 - DNA, 15 bp, Homo sapiens
gtattaaaatgcata

SEQ ID NO: 173019 - DNA, 15 bp, Homo sapiens
tattaaaatgcatat

SEQ ID NO: 173020 - DNA, 15 bp, Homo sapiens
attaaaatgcatatt

SEQ ID NO: 173021 - DNA, 15 bp, Homo sapiens
ttaaaatgcatattt

SEQ ID NO: 173022 - DNA, 15 bp, Homo sapiens
taaaatgcatatttc

SEQ ID NO: 173023 - DNA, 15 bp, Homo sapiens
aaaatgcatatttct

SEQ ID NO: 173024 - DNA, 15 bp, Homo sapiens
aaatgcatatttcta

SEQ ID NO: 173025 - DNA, 15 bp, Homo sapiens
aatgcatatttctat

SEQ ID NO: 173026 - DNA, 15 bp, Homo sapiens
atgcatatttctatg

SEQ ID NO: 173027 - DNA, 15 bp, Homo sapiens
tgcatatttctatgt

SEQ ID NO: 173028 - DNA, 15 bp, Homo sapiens
gcatatttctatgtt

SEQ ID NO: 173029 - DNA, 15 bp, Homo sapiens
catatttctatgttg

SEQ ID NO: 173030 - DNA, 15 bp, Homo sapiens
atatttctatgttgt

SEQ ID NO: 173031 - DNA, 15 bp, Homo sapiens
tatttctatgttgta

SEQ ID NO: 173032 - DNA, 15 bp, Homo sapiens
atttctatgttgtaa

SEQ ID NO: 173033 - DNA, 15 bp, Homo sapiens
tttctatgttgtaat

SEQ ID NO: 173034 - DNA, 15 bp, Homo sapiens
ttctatgttgtaata

SEQ ID NO: 173035 - DNA, 15 bp, Homo sapiens
tctatgttgtaatat

SEQ ID NO: 173036 - DNA, 15 bp, Homo sapiens
ctatgttgtaatata

SEQ ID NO: 173037 - DNA, 15 bp, Homo sapiens
tatgttgtaatataa

SEQ ID NO: 173038 - DNA, 15 bp, Homo sapiens
atgttgtaatataat

SEQ ID NO: 173039 - DNA, 15 bp, Homo sapiens
tgttgtaatataatg

SEQ ID NO: 173040 - DNA, 15 bp, Homo sapiens
gttgtaatataatga

SEQ ID NO: 173041 - DNA, 15 bp, Homo sapiens
ttgtaatataatgag

SEQ ID NO: 173042 - DNA, 15 bp, Homo sapiens
tgtaatataatgagt

SEQ ID NO: 173043 - DNA, 15 bp, Homo sapiens
gtaatataatgagtc

SEQ ID NO: 173044 - DNA, 15 bp, Homo sapiens
taatataatgagtca

SEQ ID NO: 173045 - DNA, 15 bp, Homo sapiens
aatataatgagtcac

SEQ ID NO: 173046 - DNA, 15 bp, Homo sapiens
atataatgagtcaca

SEQ ID NO: 173047 - DNA, 15 bp, Homo sapiens
tataatgagtcacaa

SEQ ID NO: 173048 - DNA, 15 bp, Homo sapiens
ataatgagtcacaaa

SEQ ID NO: 173049 - DNA, 15 bp, Homo sapiens
taatgagtcacaaaa

SEQ ID NO: 173050 - DNA, 15 bp, Homo sapiens
aatgagtcacaaaat

SEQ ID NO: 173051 - DNA, 15 bp, Homo sapiens
atgagtcacaaaata

SEQ ID NO: 173052 - DNA, 15 bp, Homo sapiens
tgagtcacaaaataa

SEQ ID NO: 173053 - DNA, 15 bp, Homo sapiens
gagtcacaaaataaa

SEQ ID NO: 173054 - DNA, 15 bp, Homo sapiens
agtcacaaaataaag

SEQ ID NO: 173055 - DNA, 15 bp, Homo sapiens
gtcacaaaataaagc

SEQ ID NO: 173056 - DNA, 15 bp, Homo sapiens
tcacaaaataaagct

SEQ ID NO: 173057 - DNA, 15 bp, Homo sapiens
cacaaaataaagctg

SEQ ID NO: 173058 - DNA, 15 bp, Homo sapiens
acaaaataaagctgt

SEQ ID NO: 173059 - DNA, 15 bp, Homo sapiens
caaaataaagctgtg

SEQ ID NO: 173060 - DNA, 15 bp, Homo sapiens
aaaataaagctgtga

SEQ ID NO: 173061 - DNA, 15 bp, Homo sapiens
aaataaagctgtgac

SEQ ID NO: 173062 - DNA, 15 bp, Homo sapiens
aataaagctgtgaca

SEQ ID NO: 173063 - DNA, 15 bp, Homo sapiens
ataaagctgtgacag

SEQ ID NO: 173064 - DNA, 15 bp, Homo sapiens
taaagctgtgacagt

SEQ ID NO: 173065 - DNA, 15 bp, Homo sapiens
aaagctgtgacagtt

SEQ ID NO: 173066 - DNA, 15 bp, Homo sapiens
aagctgtgacagttc

SEQ ID NO: 173067 - DNA, 15 bp, Homo sapiens
agctgtgacagttct

SEQ ID NO: 173068 - DNA, 15 bp, Homo sapiens
gctgtgacagttctg

SEQ ID NO: 173069 - DNA, 15 bp, Homo sapiens
ctgtgacagttctgt

SEQ ID NO: 173070 - DNA, 15 bp, Homo sapiens
tgtgacagttctgtt

SEQ ID NO: 173071 - DNA, 15 bp, Homo sapiens
gtgacagttctgttg

SEQ ID NO: 173072 - DNA, 15 bp, Homo sapiens
tgacagttctgttgg

SEQ ID NO: 173073 - DNA, 15 bp, Homo sapiens
gacagttctgttggt

SEQ ID NO: 173074 - DNA, 15 bp, Homo sapiens
acagttctgttggtc

SEQ ID NO: 173075 - DNA, 15 bp, Homo sapiens
cagttctgttggtct

SEQ ID NO: 173076 - DNA, 15 bp, Homo sapiens
agttctgttggtcta

SEQ ID NO: 173077 - DNA, 15 bp, Homo sapiens
gttctgttggtctac

SEQ ID NO: 173078 - DNA, 15 bp, Homo sapiens
ttctgttggtctaca

SEQ ID NO: 173079 - DNA, 15 bp, Homo sapiens
tctgttggtctacag

SEQ ID NO: 173080 - DNA, 15 bp, Homo sapiens
ctgttggtctacaga

SEQ ID NO: 173081 - DNA, 15 bp, Homo sapiens
tgttggtctacagaa

SEQ ID NO: 173082 - DNA, 15 bp, Homo sapiens
gttggtctacagaaa

SEQ ID NO: 173083 - DNA, 15 bp, Homo sapiens
ttggtctacagaaat

SEQ ID NO: 173084 - DNA, 15 bp, Homo sapiens
tggtctacagaaatt

SEQ ID NO: 173085 - DNA, 15 bp, Homo sapiens
ggtctacagaaattt

SEQ ID NO: 173086 - DNA, 15 bp, Homo sapiens
gtctacagaaattta

SEQ ID NO: 173087 - DNA, 15 bp, Homo sapiens
tctacagaaatttac

SEQ ID NO: 173088 - DNA, 15 bp, Homo sapiens
ctacagaaatttact

SEQ ID NO: 173089 - DNA, 15 bp, Homo sapiens
tacagaaatttactt

SEQ ID NO: 173090 - DNA, 15 bp, Homo sapiens
acagaaatttacttt

SEQ ID NO: 173091 - DNA, 15 bp, Homo sapiens
cagaaatttactttt

SEQ ID NO: 173092 - DNA, 15 bp, Homo sapiens
agaaatttacttttg

SEQ ID NO: 173093 - DNA, 15 bp, Homo sapiens
gaaatttacttttgt

SEQ ID NO: 173094 - DNA, 15 bp, Homo sapiens
aaatttacttttgtg

SEQ ID NO: 173095 - DNA, 15 bp, Homo sapiens
aatttacttttgtgc

SEQ ID NO: 173096 - DNA, 15 bp, Homo sapiens
atttacttttgtgca

SEQ ID NO: 173097 - DNA, 15 bp, Homo sapiens
tttacttttgtgcat

SEQ ID NO: 173098 - DNA, 15 bp, Homo sapiens
ttacttttgtgcatt

SEQ ID NO: 173099 - DNA, 15 bp, Homo sapiens
tacttttgtgcattt

SEQ ID NO: 173100 - DNA, 15 bp, Homo sapiens
acttttgtgcatttg

SEQ ID NO: 173101 - DNA, 15 bp, Homo sapiens
cttttgtgcatttgt

SEQ ID NO: 173102 - DNA, 15 bp, Homo sapiens
ttttgtgcatttgtg

SEQ ID NO: 173103 - DNA, 15 bp, Homo sapiens
tttgtgcatttgtgg

SEQ ID NO: 173104 - DNA, 15 bp, Homo sapiens
ttgtgcatttgtggc

SEQ ID NO: 173105 - DNA, 15 bp, Homo sapiens
tgtgcatttgtggca

SEQ ID NO: 173106 - DNA, 15 bp, Homo sapiens
gtgcatttgtggcac

SEQ ID NO: 173107 - DNA, 15 bp, Homo sapiens
tgcatttgtggcacc

SEQ ID NO: 173108 - DNA, 15 bp, Homo sapiens
gcatttgtggcacca

SEQ ID NO: 173109 - DNA, 15 bp, Homo sapiens
catttgtggcaccac

SEQ ID NO: 173110 - DNA, 15 bp, Homo sapiens
atttgtggcaccacc

SEQ ID NO: 173111 - DNA, 15 bp, Homo sapiens
tttgtggcaccacct

SEQ ID NO: 173112 - DNA, 15 bp, Homo sapiens
ttgtggcaccaccta

SEQ ID NO: 173113 - DNA, 15 bp, Homo sapiens
tgtggcaccacctac

SEQ ID NO: 173114 - DNA, 15 bp, Homo sapiens
gtggcaccacctact

SEQ ID NO: 173115 - DNA, 15 bp, Homo sapiens
tggcaccacctactg

SEQ ID NO: 173116 - DNA, 15 bp, Homo sapiens
ggcaccacctactgt

SEQ ID NO: 173117 - DNA, 15 bp, Homo sapiens
gcaccacctactgtt

SEQ ID NO: 173118 - DNA, 15 bp, Homo sapiens
caccacctactgttg

SEQ ID NO: 173119 - DNA, 15 bp, Homo sapiens
accacctactgttga

SEQ ID NO: 173120 - DNA, 15 bp, Homo sapiens
ccacctactgttgaa

SEQ ID NO: 173121 - DNA, 15 bp, Homo sapiens
cacctactgttgaag

SEQ ID NO: 173122 - DNA, 15 bp, Homo sapiens
acctactgttgaagg

SEQ ID NO: 173123 - DNA, 15 bp, Homo sapiens
cctactgttgaaggg

SEQ ID NO: 173124 - DNA, 15 bp, Homo sapiens
ctactgttgaagggt

SEQ ID NO: 173125 - DNA, 15 bp, Homo sapiens
tactgttgaagggtt

SEQ ID NO: 173126 - DNA, 15 bp, Homo sapiens
actgttgaagggtta

SEQ ID NO: 173127 - DNA, 15 bp, Homo sapiens
ctgttgaagggttat

SEQ ID NO: 173128 - DNA, 15 bp, Homo sapiens
tgttgaagggttata

SEQ ID NO: 173129 - DNA, 15 bp, Homo sapiens
gttgaagggttataa

SEQ ID NO: 173130 - DNA, 15 bp, Homo sapiens
ttgaagggttataaa

SEQ ID NO: 173131 - DNA, 15 bp, Homo sapiens
tgaagggttataaag

SEQ ID NO: 173132 - DNA, 15 bp, Homo sapiens
gaagggttataaagc

SEQ ID NO: 173133 - DNA, 15 bp, Homo sapiens
aagggttataaagcc

SEQ ID NO: 173134 - DNA, 15 bp, Homo sapiens
agggttataaagcca

SEQ ID NO: 173135 - DNA, 15 bp, Homo sapiens
gggttataaagccat

SEQ ID NO: 173136 - DNA, 15 bp, Homo sapiens
ggttataaagccatt

SEQ ID NO: 173137 - DNA, 15 bp, Homo sapiens
gttataaagccatta

SEQ ID NO: 173138 - DNA, 15 bp, Homo sapiens
ttataaagccattag

SEQ ID NO: 173139 - DNA, 15 bp, Homo sapiens
tataaagccattaga

SEQ ID NO: 173140 - DNA, 15 bp, Homo sapiens
ataaagccattagaa

SEQ ID NO: 173141 - DNA, 15 bp, Homo sapiens
taaagccattagaaa

SEQ ID NO: 173142 - DNA, 15 bp, Homo sapiens
aaagccattagaaaa

SEQ ID NO: 173143 - DNA, 15 bp, Homo sapiens
aagccattagaaaag

SEQ ID NO: 173144 - DNA, 15 bp, Homo sapiens
agccattagaaaagt

SEQ ID NO: 173145 - DNA, 15 bp, Homo sapiens
gccattagaaaagta

SEQ ID NO: 173146 - DNA, 15 bp, Homo sapiens
ccattagaaaagtag

SEQ ID NO: 173147 - DNA, 15 bp, Homo sapiens
cattagaaaagtaga

SEQ ID NO: 173148 - DNA, 15 bp, Homo sapiens
attagaaaagtagag

SEQ ID NO: 173149 - DNA, 15 bp, Homo sapiens
ttagaaaagtagagg

SEQ ID NO: 173150 - DNA, 15 bp, Homo sapiens
tagaaaagtagaggg

SEQ ID NO: 173151 - DNA, 15 bp, Homo sapiens
agaaaagtagagggg

SEQ ID NO: 173152 - DNA, 15 bp, Homo sapiens
gaaaagtagagggga

SEQ ID NO: 173153 - DNA, 15 bp, Homo sapiens
aaaagtagaggggaa

SEQ ID NO: 173154 - DNA, 15 bp, Homo sapiens
aaagtagaggggaag

SEQ ID NO: 173155 - DNA, 15 bp, Homo sapiens
aagtagaggggaagt

SEQ ID NO: 173156 - DNA, 15 bp, Homo sapiens
agtagaggggaagtg

SEQ ID NO: 173157 - DNA, 15 bp, Homo sapiens
gtagaggggaagtga

SEQ ID NO: 173158 - DNA, 15 bp, Homo sapiens
tagaggggaagtgat

SEQ ID NO: 173159 - DNA, 15 bp, Homo sapiens
agaggggaagtgatt

SEQ ID NO: 173160 - DNA, 15 bp, Homo sapiens
gaggggaagtgattt

SEQ ID NO: 173161 - DNA, 15 bp, Homo sapiens
aggggaagtgatttg

SEQ ID NO: 173162 - DNA, 15 bp, Homo sapiens
ggggaagtgatttgg

SEQ ID NO: 173163 - DNA, 15 bp, Homo sapiens
gggaagtgatttgga

SEQ ID NO: 173164 - DNA, 15 bp, Homo sapiens
ggaagtgatttggat

SEQ ID NO: 173165 - DNA, 15 bp, Homo sapiens
gaagtgatttggatc

SEQ ID NO: 173166 - DNA, 15 bp, Homo sapiens
aagtgatttggatca

SEQ ID NO: 173167 - DNA, 15 bp, Homo sapiens
agtgatttggatcaa

SEQ ID NO: 173168 - DNA, 15 bp, Homo sapiens
gtgatttggatcaaa

SEQ ID NO: 173169 - DNA, 15 bp, Homo sapiens
tgatttggatcaaaa

SEQ ID NO: 173170 - DNA, 15 bp, Homo sapiens
gatttggatcaaaag

SEQ ID NO: 173171 - DNA, 15 bp, Homo sapiens
atttggatcaaaagg

SEQ ID NO: 173172 - DNA, 15 bp, Homo sapiens
tttggatcaaaagga

SEQ ID NO: 173173 - DNA, 15 bp, Homo sapiens
ttggatcaaaaggaa

SEQ ID NO: 173174 - DNA, 15 bp, Homo sapiens
tggatcaaaaggaaa

SEQ ID NO: 173175 - DNA, 15 bp, Homo sapiens
ggatcaaaaggaaaa

SEQ ID NO: 173176 - DNA, 15 bp, Homo sapiens
gatcaaaaggaaaaa

SEQ ID NO: 173177 - DNA, 15 bp, Homo sapiens
atcaaaaggaaaaac

SEQ ID NO: 173178 - DNA, 15 bp, Homo sapiens
tcaaaaggaaaaact

SEQ ID NO: 173179 - DNA, 15 bp, Homo sapiens
caaaaggaaaaactt

SEQ ID NO: 173180 - DNA, 15 bp, Homo sapiens
aaaaggaaaaacttt

SEQ ID NO: 173181 - DNA, 15 bp, Homo sapiens
aaaggaaaaacttta

SEQ ID NO: 173182 - DNA, 15 bp, Homo sapiens
aaggaaaaactttag

SEQ ID NO: 173183 - DNA, 15 bp, Homo sapiens
aggaaaaactttaga

SEQ ID NO: 173184 - DNA, 15 bp, Homo sapiens
ggaaaaactttagaa

SEQ ID NO: 173185 - DNA, 15 bp, Homo sapiens
gaaaaactttagaaa

SEQ ID NO: 173186 - DNA, 15 bp, Homo sapiens
aaaaactttagaaaa

SEQ ID NO: 173187 - DNA, 15 bp, Homo sapiens
aaaactttagaaaag

SEQ ID NO: 173188 - DNA, 15 bp, Homo sapiens
aaactttagaaaaga

SEQ ID NO: 173189 - DNA, 15 bp, Homo sapiens
aactttagaaaagat

SEQ ID NO: 173190 - DNA, 15 bp, Homo sapiens
actttagaaaagatt

SEQ ID NO: 173191 - DNA, 15 bp, Homo sapiens
ctttagaaaagattc

SEQ ID NO: 173192 - DNA, 15 bp, Homo sapiens
tttagaaaagattca

SEQ ID NO: 173193 - DNA, 15 bp, Homo sapiens
ttagaaaagattcaa

SEQ ID NO: 173194 - DNA, 15 bp, Homo sapiens
tagaaaagattcaaa

SEQ ID NO: 173195 - DNA, 15 bp, Homo sapiens
agaaaagattcaaat

SEQ ID NO: 173196 - DNA, 15 bp, Homo sapiens
gaaaagattcaaatg

SEQ ID NO: 173197 - DNA, 15 bp, Homo sapiens
aaaagattcaaatgt

SEQ ID NO: 173198 - DNA, 15 bp, Homo sapiens
aaagattcaaatgtt

SEQ ID NO: 173199 - DNA, 15 bp, Homo sapiens
aagattcaaatgttc

SEQ ID NO: 173200 - DNA, 15 bp, Homo sapiens
agattcaaatgttcc

SEQ ID NO: 173201 - DNA, 15 bp, Homo sapiens
gattcaaatgttccc

SEQ ID NO: 173202 - DNA, 15 bp, Homo sapiens
attcaaatgttccct

SEQ ID NO: 173203 - DNA, 15 bp, Homo sapiens
ttcaaatgttccctt

SEQ ID NO: 173204 - DNA, 15 bp, Homo sapiens
tcaaatgttccctta

SEQ ID NO: 173205 - DNA, 15 bp, Homo sapiens
caaatgttcccttaa

SEQ ID NO: 173206 - DNA, 15 bp, Homo sapiens
aaatgttcccttaat

SEQ ID NO: 173207 - DNA, 15 bp, Homo sapiens
aatgttcccttaatc

SEQ ID NO: 173208 - DNA, 15 bp, Homo sapiens
atgttcccttaatca

SEQ ID NO: 173209 - DNA, 15 bp, Homo sapiens
tgttcccttaatcat

SEQ ID NO: 173210 - DNA, 15 bp, Homo sapiens
gttcccttaatcata

SEQ ID NO: 173211 - DNA, 15 bp, Homo sapiens
ttcccttaatcataa

SEQ ID NO: 173212 - DNA, 15 bp, Homo sapiens
tcccttaatcataaa

SEQ ID NO: 173213 - DNA, 15 bp, Homo sapiens
cccttaatcataaaa

SEQ ID NO: 173214 - DNA, 15 bp, Homo sapiens
ccttaatcataaaag

SEQ ID NO: 173215 - DNA, 15 bp, Homo sapiens
cttaatcataaaaga

SEQ ID NO: 173216 - DNA, 15 bp, Homo sapiens
ttaatcataaaagag

SEQ ID NO: 173217 - DNA, 15 bp, Homo sapiens
taatcataaaagaga

SEQ ID NO: 173218 - DNA, 15 bp, Homo sapiens
aatcataaaagagaa

SEQ ID NO: 173219 - DNA, 15 bp, Homo sapiens
atcataaaagagaac

SEQ ID NO: 173220 - DNA, 15 bp, Homo sapiens
tcataaaagagaact

SEQ ID NO: 173221 - DNA, 15 bp, Homo sapiens
cataaaagagaactg

SEQ ID NO: 173222 - DNA, 15 bp, Homo sapiens
ataaaagagaactga

SEQ ID NO: 173223 - DNA, 15 bp, Homo sapiens
taaaagagaactgag

SEQ ID NO: 173224 - DNA, 15 bp, Homo sapiens
aaaagagaactgagg

SEQ ID NO: 173225 - DNA, 15 bp, Homo sapiens
aaagagaactgaggg

SEQ ID NO: 173226 - DNA, 15 bp, Homo sapiens
aagagaactgagggg

SEQ ID NO: 173227 - DNA, 15 bp, Homo sapiens
agagaactgagggga

SEQ ID NO: 173228 - DNA, 15 bp, Homo sapiens
gagaactgaggggac

SEQ ID NO: 173229 - DNA, 15 bp, Homo sapiens
agaactgaggggact

SEQ ID NO: 173230 - DNA, 15 bp, Homo sapiens
gaactgaggggacta

SEQ ID NO: 173231 - DNA, 15 bp, Homo sapiens
aactgaggggactac

SEQ ID NO: 173232 - DNA, 15 bp, Homo sapiens
actgaggggactact

SEQ ID NO: 173233 - DNA, 15 bp, Homo sapiens
ctgaggggactactt

SEQ ID NO: 173234 - DNA, 15 bp, Homo sapiens
tgaggggactacttg

SEQ ID NO: 173235 - DNA, 15 bp, Homo sapiens
gaggggactacttga

SEQ ID NO: 173236 - DNA, 15 bp, Homo sapiens
aggggactacttgaa

SEQ ID NO: 173237 - DNA, 15 bp, Homo sapiens
ggggactacttgaaa

SEQ ID NO: 173238 - DNA, 15 bp, Homo sapiens
gggactacttgaaaa

SEQ ID NO: 173239 - DNA, 15 bp, Homo sapiens
ggactacttgaaaat

SEQ ID NO: 173240 - DNA, 15 bp, Homo sapiens
gactacttgaaaata

SEQ ID NO: 173241 - DNA, 15 bp, Homo sapiens
actacttgaaaataa

SEQ ID NO: 173242 - DNA, 15 bp, Homo sapiens
ctacttgaaaataaa

SEQ ID NO: 173243 - DNA, 15 bp, Homo sapiens
tacttgaaaataaaa

SEQ ID NO: 173244 - DNA, 15 bp, Homo sapiens
acttgaaaataaaag

SEQ ID NO: 173245 - DNA, 15 bp, Homo sapiens
cttgaaaataaaagg

SEQ ID NO: 173246 - DNA, 15 bp, Homo sapiens
ttgaaaataaaaggt

SEQ ID NO: 173247 - DNA, 15 bp, Homo sapiens
tgaaaataaaaggtt

SEQ ID NO: 173248 - DNA, 15 bp, Homo sapiens
gaaaataaaaggttg

SEQ ID NO: 173249 - DNA, 15 bp, Homo sapiens
aaaataaaaggttgt

SEQ ID NO: 173250 - DNA, 15 bp, Homo sapiens
aaataaaaggttgtt

SEQ ID NO: 173251 - DNA, 15 bp, Homo sapiens
aataaaaggttgttt

SEQ ID NO: 173252 - DNA, 15 bp, Homo sapiens
ataaaaggttgtttt

SEQ ID NO: 173253 - DNA, 15 bp, Homo sapiens
taaaaggttgttttg

SEQ ID NO: 173254 - DNA, 15 bp, Homo sapiens
aaaaggttgttttgt

SEQ ID NO: 173255 - DNA, 15 bp, Homo sapiens
aaaggttgttttgta

SEQ ID NO: 173256 - DNA, 15 bp, Homo sapiens
aaggttgttttgtat

SEQ ID NO: 173257 - DNA, 15 bp, Homo sapiens
aggttgttttgtatt

SEQ ID NO: 173258 - DNA, 15 bp, Homo sapiens
ggttgttttgtattt

SEQ ID NO: 173259 - DNA, 15 bp, Homo sapiens
gttgttttgtatttt

SEQ ID NO: 173260 - DNA, 15 bp, Homo sapiens
ttgttttgtattttc

SEQ ID NO: 173261 - DNA, 15 bp, Homo sapiens
tgttttgtattttca

SEQ ID NO: 173262 - DNA, 15 bp, Homo sapiens
gttttgtattttcat

SEQ ID NO: 173263 - DNA, 15 bp, Homo sapiens
ttttgtattttcatg

SEQ ID NO: 173264 - DNA, 15 bp, Homo sapiens
tttgtattttcatgt

SEQ ID NO: 173265 - DNA, 15 bp, Homo sapiens
ttgtattttcatgtt

SEQ ID NO: 173266 - DNA, 15 bp, Homo sapiens
tgtattttcatgttg

SEQ ID NO: 173267 - DNA, 15 bp, Homo sapiens
gtattttcatgttgg

SEQ ID NO: 173268 - DNA, 15 bp, Homo sapiens
tattttcatgttggt

SEQ ID NO: 173269 - DNA, 15 bp, Homo sapiens
attttcatgttggtt

SEQ ID NO: 173270 - DNA, 15 bp, Homo sapiens
ttttcatgttggtta

SEQ ID NO: 173271 - DNA, 15 bp, Homo sapiens
tttcatgttggttaa

SEQ ID NO: 173272 - DNA, 15 bp, Homo sapiens
ttcatgttggttaag

SEQ ID NO: 173273 - DNA, 15 bp, Homo sapiens
tcatgttggttaaga

SEQ ID NO: 173274 - DNA, 15 bp, Homo sapiens
catgttggttaagat

SEQ ID NO: 173275 - DNA, 15 bp, Homo sapiens
atgttggttaagata

SEQ ID NO: 173276 - DNA, 15 bp, Homo sapiens
tgttggttaagatac

SEQ ID NO: 173277 - DNA, 15 bp, Homo sapiens
gttggttaagatact

SEQ ID NO: 173278 - DNA, 15 bp, Homo sapiens
ttggttaagatactg

SEQ ID NO: 173279 - DNA, 15 bp, Homo sapiens
tggttaagatactga

SEQ ID NO: 173280 - DNA, 15 bp, Homo sapiens
ggttaagatactgag

SEQ ID NO: 173281 - DNA, 15 bp, Homo sapiens
gttaagatactgagt

SEQ ID NO: 173282 - DNA, 15 bp, Homo sapiens
ttaagatactgagta

SEQ ID NO: 173283 - DNA, 15 bp, Homo sapiens
taagatactgagtaa

SEQ ID NO: 173284 - DNA, 15 bp, Homo sapiens
aagatactgagtaac

SEQ ID NO: 173285 - DNA, 15 bp, Homo sapiens
agatactgagtaact

SEQ ID NO: 173286 - DNA, 15 bp, Homo sapiens
gatactgagtaactg

SEQ ID NO: 173287 - DNA, 15 bp, Homo sapiens
atactgagtaactgg

SEQ ID NO: 173288 - DNA, 15 bp, Homo sapiens
tactgagtaactggt

SEQ ID NO: 173289 - DNA, 15 bp, Homo sapiens
actgagtaactggta

SEQ ID NO: 173290 - DNA, 15 bp, Homo sapiens
ctgagtaactggtat

SEQ ID NO: 173291 - DNA, 15 bp, Homo sapiens
tgagtaactggtatt

SEQ ID NO: 173292 - DNA, 15 bp, Homo sapiens
gagtaactggtatta

SEQ ID NO: 173293 - DNA, 15 bp, Homo sapiens
agtaactggtattaa

SEQ ID NO: 173294 - DNA, 15 bp, Homo sapiens
gtaactggtattaag

SEQ ID NO: 173295 - DNA, 15 bp, Homo sapiens
taactggtattaagt

SEQ ID NO: 173296 - DNA, 15 bp, Homo sapiens
aactggtattaagtg

SEQ ID NO: 173297 - DNA, 15 bp, Homo sapiens
actggtattaagtgt

SEQ ID NO: 173298 - DNA, 15 bp, Homo sapiens
ctggtattaagtgtt

SEQ ID NO: 173299 - DNA, 15 bp, Homo sapiens
tggtattaagtgtta

SEQ ID NO: 173300 - DNA, 15 bp, Homo sapiens
ggtattaagtgttag

SEQ ID NO: 173301 - DNA, 15 bp, Homo sapiens
gtattaagtgttaga

SEQ ID NO: 173302 - DNA, 15 bp, Homo sapiens
tattaagtgttagag

SEQ ID NO: 173303 - DNA, 15 bp, Homo sapiens
attaagtgttagagg

SEQ ID NO: 173304 - DNA, 15 bp, Homo sapiens
ttaagtgttagaggt

SEQ ID NO: 173305 - DNA, 15 bp, Homo sapiens
taagtgttagaggtt

SEQ ID NO: 173306 - DNA, 15 bp, Homo sapiens
aagtgttagaggttt

SEQ ID NO: 173307 - DNA, 15 bp, Homo sapiens
agtgttagaggtttt

SEQ ID NO: 173308 - DNA, 15 bp, Homo sapiens
gtgttagaggttttt

SEQ ID NO: 173309 - DNA, 15 bp, Homo sapiens
tgttagaggttttta

SEQ ID NO: 173310 - DNA, 15 bp, Homo sapiens
gttagaggtttttag

SEQ ID NO: 173311 - DNA, 15 bp, Homo sapiens
ttagaggtttttaga

SEQ ID NO: 173312 - DNA, 15 bp, Homo sapiens
tagaggtttttagat

SEQ ID NO: 173313 - DNA, 15 bp, Homo sapiens
agaggtttttagata

SEQ ID NO: 173314 - DNA, 15 bp, Homo sapiens
gaggtttttagataa

SEQ ID NO: 173315 - DNA, 15 bp, Homo sapiens
aggtttttagataaa

SEQ ID NO: 173316 - DNA, 15 bp, Homo sapiens
ggtttttagataaat

SEQ ID NO: 173317 - DNA, 15 bp, Homo sapiens
gtttttagataaata

SEQ ID NO: 173318 - DNA, 15 bp, Homo sapiens
tttttagataaatat

SEQ ID NO: 173319 - DNA, 15 bp, Homo sapiens
ttttagataaatatt

SEQ ID NO: 173320 - DNA, 15 bp, Homo sapiens
tttagataaatattc

SEQ ID NO: 173321 - DNA, 15 bp, Homo sapiens
ttagataaatattct

SEQ ID NO: 173322 - DNA, 15 bp, Homo sapiens
tagataaatattctg

SEQ ID NO: 173323 - DNA, 15 bp, Homo sapiens
agataaatattctgc

SEQ ID NO: 173324 - DNA, 15 bp, Homo sapiens
gataaatattctgct

SEQ ID NO: 173325 - DNA, 15 bp, Homo sapiens
ataaatattctgctt

SEQ ID NO: 173326 - DNA, 15 bp, Homo sapiens
taaatattctgctta

SEQ ID NO: 173327 - DNA, 15 bp, Homo sapiens
aaatattctgcttaa

SEQ ID NO: 173328 - DNA, 15 bp, Homo sapiens
aatattctgcttaat

SEQ ID NO: 173329 - DNA, 15 bp, Homo sapiens
atattctgcttaatg

SEQ ID NO: 173330 - DNA, 15 bp, Homo sapiens
tattctgcttaatga

SEQ ID NO: 173331 - DNA, 15 bp, Homo sapiens
attctgcttaatgat

SEQ ID NO: 173332 - DNA, 15 bp, Homo sapiens
ttctgcttaatgatt

SEQ ID NO: 173333 - DNA, 15 bp, Homo sapiens
tctgcttaatgatta

SEQ ID NO: 173334 - DNA, 15 bp, Homo sapiens
ctgcttaatgattat

SEQ ID NO: 173335 - DNA, 15 bp, Homo sapiens
tgcttaatgattatg

SEQ ID NO: 173336 - DNA, 15 bp, Homo sapiens
gcttaatgattatga

SEQ ID NO: 173337 - DNA, 15 bp, Homo sapiens
cttaatgattatgaa

SEQ ID NO: 173338 - DNA, 15 bp, Homo sapiens
ttaatgattatgaag

SEQ ID NO: 173339 - DNA, 15 bp, Homo sapiens
taatgattatgaagc

SEQ ID NO: 173340 - DNA, 15 bp, Homo sapiens
aatgattatgaagct

SEQ ID NO: 173341 - DNA, 15 bp, Homo sapiens
atgattatgaagctg

SEQ ID NO: 173342 - DNA, 15 bp, Homo sapiens
tgattatgaagctgc

SEQ ID NO: 173343 - DNA, 15 bp, Homo sapiens
gattatgaagctgca

SEQ ID NO: 173344 - DNA, 15 bp, Homo sapiens
attatgaagctgcac

SEQ ID NO: 173345 - DNA, 15 bp, Homo sapiens
ttatgaagctgcact

SEQ ID NO: 173346 - DNA, 15 bp, Homo sapiens
tatgaagctgcactg

SEQ ID NO: 173347 - DNA, 15 bp, Homo sapiens
atgaagctgcactga

SEQ ID NO: 173348 - DNA, 15 bp, Homo sapiens
tgaagctgcactgag

SEQ ID NO: 173349 - DNA, 15 bp, Homo sapiens
gaagctgcactgaga

SEQ ID NO: 173350 - DNA, 15 bp, Homo sapiens
aagctgcactgagat

SEQ ID NO: 173351 - DNA, 15 bp, Homo sapiens
agctgcactgagatt

SEQ ID NO: 173352 - DNA, 15 bp, Homo sapiens
gctgcactgagattt

SEQ ID NO: 173353 - DNA, 15 bp, Homo sapiens
ctgcactgagatttc

SEQ ID NO: 173354 - DNA, 15 bp, Homo sapiens
tgcactgagatttct

SEQ ID NO: 173355 - DNA, 15 bp, Homo sapiens
gcactgagatttctg

SEQ ID NO: 173356 - DNA, 15 bp, Homo sapiens
cactgagatttctga

SEQ ID NO: 173357 - DNA, 15 bp, Homo sapiens
actgagatttctgaa

SEQ ID NO: 173358 - DNA, 15 bp, Homo sapiens
ctgagatttctgaaa

SEQ ID NO: 173359 - DNA, 15 bp, Homo sapiens
tgagatttctgaaaa

SEQ ID NO: 173360 - DNA, 15 bp, Homo sapiens
gagatttctgaaaat

SEQ ID NO: 173361 - DNA, 15 bp, Homo sapiens
agatttctgaaaatg

SEQ ID NO: 173362 - DNA, 15 bp, Homo sapiens
gatttctgaaaatgc

SEQ ID NO: 173363 - DNA, 15 bp, Homo sapiens
atttctgaaaatgct

SEQ ID NO: 173364 - DNA, 15 bp, Homo sapiens
tttctgaaaatgctc

SEQ ID NO: 173365 - DNA, 15 bp, Homo sapiens
ttctgaaaatgctct

SEQ ID NO: 173366 - DNA, 15 bp, Homo sapiens
tctgaaaatgctctg

SEQ ID NO: 173367 - DNA, 15 bp, Homo sapiens
ctgaaaatgctctgt

SEQ ID NO: 173368 - DNA, 15 bp, Homo sapiens
tgaaaatgctctgta

SEQ ID NO: 173369 - DNA, 15 bp, Homo sapiens
gaaaatgctctgtag

SEQ ID NO: 173370 - DNA, 15 bp, Homo sapiens
aaaatgctctgtagc

SEQ ID NO: 173371 - DNA, 15 bp, Homo sapiens
aaatgctctgtagct

SEQ ID NO: 173372 - DNA, 15 bp, Homo sapiens
aatgctctgtagctg

SEQ ID NO: 173373 - DNA, 15 bp, Homo sapiens
atgctctgtagctga

SEQ ID NO: 173374 - DNA, 15 bp, Homo sapiens
tgctctgtagctgag

SEQ ID NO: 173375 - DNA, 15 bp, Homo sapiens
gctctgtagctgagc

SEQ ID NO: 173376 - DNA, 15 bp, Homo sapiens
ctctgtagctgagct

SEQ ID NO: 173377 - DNA, 15 bp, Homo sapiens
tctgtagctgagctt

SEQ ID NO: 173378 - DNA, 15 bp, Homo sapiens
ctgtagctgagctta

SEQ ID NO: 173379 - DNA, 15 bp, Homo sapiens
tgtagctgagcttat

SEQ ID NO: 173380 - DNA, 15 bp, Homo sapiens
gtagctgagcttatt

SEQ ID NO: 173381 - DNA, 15 bp, Homo sapiens
tagctgagcttattt

SEQ ID NO: 173382 - DNA, 15 bp, Homo sapiens
agctgagcttattta

SEQ ID NO: 173383 - DNA, 15 bp, Homo sapiens
gctgagcttatttaa

SEQ ID NO: 173384 - DNA, 15 bp, Homo sapiens
ctgagcttatttaat

SEQ ID NO: 173385 - DNA, 15 bp, Homo sapiens
tgagcttatttaata

SEQ ID NO: 173386 - DNA, 15 bp, Homo sapiens
gagcttatttaataa

SEQ ID NO: 173387 - DNA, 15 bp, Homo sapiens
agcttatttaataaa

SEQ ID NO: 173388 - DNA, 15 bp, Homo sapiens
gcttatttaataaat

SEQ ID NO: 173389 - DNA, 15 bp, Homo sapiens
cttatttaataaatg

SEQ ID NO: 173390 - DNA, 15 bp, Homo sapiens
ttatttaataaatgt

SEQ ID NO: 173391 - DNA, 15 bp, Homo sapiens
tatttaataaatgtt

SEQ ID NO: 173392 - DNA, 15 bp, Homo sapiens
atttaataaatgttc

SEQ ID NO: 173393 - DNA, 15 bp, Homo sapiens
tttaataaatgttca

SEQ ID NO: 173394 - DNA, 15 bp, Homo sapiens
ttaataaatgttcac

SEQ ID NO: 173395 - DNA, 15 bp, Homo sapiens
taataaatgttcact

SEQ ID NO: 173396 - DNA, 15 bp, Homo sapiens
aataaatgttcactt

SEQ ID NO: 173397 - DNA, 15 bp, Homo sapiens
ataaatgttcacttg

SEQ ID NO: 173398 - DNA, 15 bp, Homo sapiens
taaatgttcacttgg

SEQ ID NO: 173399 - DNA, 15 bp, Homo sapiens
aaatgttcacttggt

SEQ ID NO: 173400 - DNA, 15 bp, Homo sapiens
aatgttcacttggta

SEQ ID NO: 173401 - DNA, 15 bp, Homo sapiens
atgttcacttggtat

SEQ ID NO: 173402 - DNA, 15 bp, Homo sapiens
tgttcacttggtata

SEQ ID NO: 173403 - DNA, 15 bp, Homo sapiens
gttcacttggtatag

SEQ ID NO: 173404 - DNA, 15 bp, Homo sapiens
ttcacttggtatagg

SEQ ID NO: 173405 - DNA, 15 bp, Homo sapiens
tcacttggtataggg

SEQ ID NO: 173406 - DNA, 15 bp, Homo sapiens
cacttggtatagggg

SEQ ID NO: 173407 - DNA, 15 bp, Homo sapiens
acttggtatagggga

SEQ ID NO: 173408 - DNA, 15 bp, Homo sapiens
cttggtataggggaa

SEQ ID NO: 173409 - DNA, 15 bp, Homo sapiens
ttggtataggggaag

SEQ ID NO: 173410 - DNA, 15 bp, Homo sapiens
tggtataggggaagc

SEQ ID NO: 173411 - DNA, 15 bp, Homo sapiens
ggtataggggaagct

SEQ ID NO: 173412 - DNA, 15 bp, Homo sapiens
gtataggggaagcta

SEQ ID NO: 173413 - DNA, 15 bp, Homo sapiens
tataggggaagctac

SEQ ID NO: 173414 - DNA, 15 bp, Homo sapiens
ataggggaagctaca

SEQ ID NO: 173415 - DNA, 15 bp, Homo sapiens
taggggaagctacaa

SEQ ID NO: 173416 - DNA, 15 bp, Homo sapiens
aggggaagctacaaa

SEQ ID NO: 173417 - DNA, 15 bp, Homo sapiens
ggggaagctacaaag

SEQ ID NO: 173418 - DNA, 15 bp, Homo sapiens
gggaagctacaaagg

SEQ ID NO: 173419 - DNA, 15 bp, Homo sapiens
ggaagctacaaaggc

SEQ ID NO: 173420 - DNA, 15 bp, Homo sapiens
gaagctacaaaggca

SEQ ID NO: 173421 - DNA, 15 bp, Homo sapiens
aagctacaaaggcag

SEQ ID NO: 173422 - DNA, 15 bp, Homo sapiens
agctacaaaggcagc

SEQ ID NO: 173423 - DNA, 15 bp, Homo sapiens
gctacaaaggcagcc

SEQ ID NO: 173424 - DNA, 15 bp, Homo sapiens
ctacaaaggcagcct

SEQ ID NO: 173425 - DNA, 15 bp, Homo sapiens
tacaaaggcagcctt

SEQ ID NO: 173426 - DNA, 15 bp, Homo sapiens
acaaaggcagccttc

SEQ ID NO: 173427 - DNA, 15 bp, Homo sapiens
caaaggcagccttca

SEQ ID NO: 173428 - DNA, 15 bp, Homo sapiens
aaaggcagccttcag

SEQ ID NO: 173429 - DNA, 15 bp, Homo sapiens
aaggcagccttcagt

SEQ ID NO: 173430 - DNA, 15 bp, Homo sapiens
aggcagccttcagtg

SEQ ID NO: 173431 - DNA, 15 bp, Homo sapiens
ggcagccttcagtgt

SEQ ID NO: 173432 - DNA, 15 bp, Homo sapiens
gcagccttcagtgtc

SEQ ID NO: 173433 - DNA, 15 bp, Homo sapiens
cagccttcagtgtcc

SEQ ID NO: 173434 - DNA, 15 bp, Homo sapiens
agccttcagtgtcct

SEQ ID NO: 173435 - DNA, 15 bp, Homo sapiens
gccttcagtgtcctt

SEQ ID NO: 173436 - DNA, 15 bp, Homo sapiens
ccttcagtgtccttt

SEQ ID NO: 173437 - DNA, 15 bp, Homo sapiens
cttcagtgtcctttt

SEQ ID NO: 173438 - DNA, 15 bp, Homo sapiens
ttcagtgtccttttg

SEQ ID NO: 173439 - DNA, 15 bp, Homo sapiens
tcagtgtccttttgt

SEQ ID NO: 173440 - DNA, 15 bp, Homo sapiens
cagtgtccttttgtt

SEQ ID NO: 173441 - DNA, 15 bp, Homo sapiens
agtgtccttttgttt

SEQ ID NO: 173442 - DNA, 15 bp, Homo sapiens
gtgtccttttgttta

SEQ ID NO: 173443 - DNA, 15 bp, Homo sapiens
tgtccttttgtttat

SEQ ID NO: 173444 - DNA, 15 bp, Homo sapiens
gtccttttgtttatt

SEQ ID NO: 173445 - DNA, 15 bp, Homo sapiens
tccttttgtttattc

SEQ ID NO: 173446 - DNA, 15 bp, Homo sapiens
ccttttgtttattca

SEQ ID NO: 173447 - DNA, 15 bp, Homo sapiens
cttttgtttattcaa

SEQ ID NO: 173448 - DNA, 15 bp, Homo sapiens
ttttgtttattcaac

SEQ ID NO: 173449 - DNA, 15 bp, Homo sapiens
tttgtttattcaacc

SEQ ID NO: 173450 - DNA, 15 bp, Homo sapiens
ttgtttattcaacca

SEQ ID NO: 173451 - DNA, 15 bp, Homo sapiens
tgtttattcaaccaa

SEQ ID NO: 173452 - DNA, 15 bp, Homo sapiens
gtttattcaaccaaa

SEQ ID NO: 173453 - DNA, 15 bp, Homo sapiens
tttattcaaccaaaa

SEQ ID NO: 173454 - DNA, 15 bp, Homo sapiens
ttattcaaccaaaaa

SEQ ID NO: 173455 - DNA, 15 bp, Homo sapiens
tattcaaccaaaaat

SEQ ID NO: 173456 - DNA, 15 bp, Homo sapiens
attcaaccaaaaata

SEQ ID NO: 173457 - DNA, 15 bp, Homo sapiens
ttcaaccaaaaatat

SEQ ID NO: 173458 - DNA, 15 bp, Homo sapiens
tcaaccaaaaatata

SEQ ID NO: 173459 - DNA, 15 bp, Homo sapiens
caaccaaaaatataa

SEQ ID NO: 173460 - DNA, 15 bp, Homo sapiens
aaccaaaaatataag

SEQ ID NO: 173461 - DNA, 15 bp, Homo sapiens
accaaaaatataagg

SEQ ID NO: 173462 - DNA, 15 bp, Homo sapiens
ccaaaaatataagga

SEQ ID NO: 173463 - DNA, 15 bp, Homo sapiens
caaaaatataaggac

SEQ ID NO: 173464 - DNA, 15 bp, Homo sapiens
aaaaatataaggaca

SEQ ID NO: 173465 - DNA, 15 bp, Homo sapiens
aaaatataaggacac

SEQ ID NO: 173466 - DNA, 15 bp, Homo sapiens
aaatataaggacaca

SEQ ID NO: 173467 - DNA, 15 bp, Homo sapiens
aatataaggacacaa

SEQ ID NO: 173468 - DNA, 15 bp, Homo sapiens
atataaggacacaat

SEQ ID NO: 173469 - DNA, 15 bp, Homo sapiens
tataaggacacaatg

SEQ ID NO: 173470 - DNA, 15 bp, Homo sapiens
ataaggacacaatgt

SEQ ID NO: 173471 - DNA, 15 bp, Homo sapiens
taaggacacaatgta

SEQ ID NO: 173472 - DNA, 15 bp, Homo sapiens
aaggacacaatgtag

SEQ ID NO: 173473 - DNA, 15 bp, Homo sapiens
aggacacaatgtagc

SEQ ID NO: 173474 - DNA, 15 bp, Homo sapiens
ggacacaatgtagca

SEQ ID NO: 173475 - DNA, 15 bp, Homo sapiens
gacacaatgtagcag

SEQ ID NO: 173476 - DNA, 15 bp, Homo sapiens
acacaatgtagcagt

SEQ ID NO: 173477 - DNA, 15 bp, Homo sapiens
cacaatgtagcagtt

SEQ ID NO: 173478 - DNA, 15 bp, Homo sapiens
acaatgtagcagtta

SEQ ID NO: 173479 - DNA, 15 bp, Homo sapiens
caatgtagcagttat

SEQ ID NO: 173480 - DNA, 15 bp, Homo sapiens
aatgtagcagttata

SEQ ID NO: 173481 - DNA, 15 bp, Homo sapiens
atgtagcagttatac

SEQ ID NO: 173482 - DNA, 15 bp, Homo sapiens
tgtagcagttatact

SEQ ID NO: 173483 - DNA, 15 bp, Homo sapiens
gtagcagttatactg

SEQ ID NO: 173484 - DNA, 15 bp, Homo sapiens
tagcagttatactgg

SEQ ID NO: 173485 - DNA, 15 bp, Homo sapiens
agcagttatactggg

SEQ ID NO: 173486 - DNA, 15 bp, Homo sapiens
gcagttatactggga

SEQ ID NO: 173487 - DNA, 15 bp, Homo sapiens
cagttatactgggaa

SEQ ID NO: 173488 - DNA, 15 bp, Homo sapiens
agttatactgggaag

SEQ ID NO: 173489 - DNA, 15 bp, Homo sapiens
gttatactgggaagg

SEQ ID NO: 173490 - DNA, 15 bp, Homo sapiens
ttatactgggaaggt

SEQ ID NO: 173491 - DNA, 15 bp, Homo sapiens
tatactgggaaggtg

SEQ ID NO: 173492 - DNA, 15 bp, Homo sapiens
atactgggaaggtgc

SEQ ID NO: 173493 - DNA, 15 bp, Homo sapiens
tactgggaaggtgct

SEQ ID NO: 173494 - DNA, 15 bp, Homo sapiens
actgggaaggtgctg

SEQ ID NO: 173495 - DNA, 15 bp, Homo sapiens
ctgggaaggtgctgg

SEQ ID NO: 173496 - DNA, 15 bp, Homo sapiens
tgggaaggtgctggg

SEQ ID NO: 173497 - DNA, 15 bp, Homo sapiens
gggaaggtgctgggg

SEQ ID NO: 173498 - DNA, 15 bp, Homo sapiens
ggaaggtgctggggg

SEQ ID NO: 173499 - DNA, 15 bp, Homo sapiens
gaaggtgctgggggt

SEQ ID NO: 173500 - DNA, 15 bp, Homo sapiens
atgtggggttggctg

SEQ ID NO: 173501 - DNA, 15 bp, Homo sapiens
tgtggggttggctgt

SEQ ID NO: 173502 - DNA, 15 bp, Homo sapiens
gtggggttggctgta

SEQ ID NO: 173503 - DNA, 15 bp, Homo sapiens
tggggttggctgtag

SEQ ID NO: 173504 - DNA, 15 bp, Homo sapiens
ggggttggctgtaga

SEQ ID NO: 173505 - DNA, 15 bp, Homo sapiens
gggttggctgtagaa

SEQ ID NO: 173506 - DNA, 15 bp, Homo sapiens
ggttggctgtagaaa

SEQ ID NO: 173507 - DNA, 15 bp, Homo sapiens
gttggctgtagaaag

SEQ ID NO: 173508 - DNA, 15 bp, Homo sapiens
ttggctgtagaaagc

SEQ ID NO: 173509 - DNA, 15 bp, Homo sapiens
tggctgtagaaagcg

SEQ ID NO: 173510 - DNA, 15 bp, Homo sapiens
ggctgtagaaagcgg

SEQ ID NO: 173511 - DNA, 15 bp, Homo sapiens
gctgtagaaagcggg

SEQ ID NO: 173512 - DNA, 15 bp, Homo sapiens
ctgtagaaagcgggc

SEQ ID NO: 173513 - DNA, 15 bp, Homo sapiens
tgtagaaagcgggca

SEQ ID NO: 173514 - DNA, 15 bp, Homo sapiens
gtagaaagcgggcag

SEQ ID NO: 173515 - DNA, 15 bp, Homo sapiens
tagaaagcgggcaga

SEQ ID NO: 173516 - DNA, 15 bp, Homo sapiens
agaaagcgggcagac

SEQ ID NO: 173517 - DNA, 15 bp, Homo sapiens
gaaagcgggcagacg

SEQ ID NO: 173518 - DNA, 15 bp, Homo sapiens
aaagcgggcagacgg

SEQ ID NO: 173519 - DNA, 15 bp, Homo sapiens
aagcgggcagacggg

SEQ ID NO: 173520 - DNA, 15 bp, Homo sapiens
agcgggcagacgggg

SEQ ID NO: 173521 - DNA, 15 bp, Homo sapiens
gcgggcagacggggt

SEQ ID NO: 173522 - DNA, 15 bp, Homo sapiens
cgggcagacggggtg

SEQ ID NO: 173523 - DNA, 15 bp, Homo sapiens
gggcagacggggtgg

SEQ ID NO: 173524 - DNA, 15 bp, Homo sapiens
ggcagacggggtggg

SEQ ID NO: 173525 - DNA, 15 bp, Homo sapiens
gcagacggggtggga

SEQ ID NO: 173526 - DNA, 15 bp, Homo sapiens
cagacggggtgggaa

SEQ ID NO: 173527 - DNA, 15 bp, Homo sapiens
agacggggtgggaac

SEQ ID NO: 173528 - DNA, 15 bp, Homo sapiens
gacggggtgggaact

SEQ ID NO: 173529 - DNA, 15 bp, Homo sapiens
acggggtgggaactt

SEQ ID NO: 173530 - DNA, 15 bp, Homo sapiens
cggggtgggaactta

SEQ ID NO: 173531 - DNA, 15 bp, Homo sapiens
ggggtgggaacttat

SEQ ID NO: 173532 - DNA, 15 bp, Homo sapiens
gggtgggaacttatg

SEQ ID NO: 173533 - DNA, 15 bp, Homo sapiens
ggtgggaacttatga

SEQ ID NO: 173534 - DNA, 15 bp, Homo sapiens
gtgggaacttatgaa

SEQ ID NO: 173535 - DNA, 15 bp, Homo sapiens
tgggaacttatgaag

SEQ ID NO: 173536 - DNA, 15 bp, Homo sapiens
gggaacttatgaaga

SEQ ID NO: 173537 - DNA, 15 bp, Homo sapiens
ggaacttatgaagac

SEQ ID NO: 173538 - DNA, 15 bp, Homo sapiens
gaacttatgaagact

SEQ ID NO: 173539 - DNA, 15 bp, Homo sapiens
aacttatgaagactc

SEQ ID NO: 173540 - DNA, 15 bp, Homo sapiens
acttatgaagactct

SEQ ID NO: 173541 - DNA, 15 bp, Homo sapiens
cttatgaagactctt

SEQ ID NO: 173542 - DNA, 15 bp, Homo sapiens
ttatgaagactcttc

SEQ ID NO: 173543 - DNA, 15 bp, Homo sapiens
tatgaagactcttct

SEQ ID NO: 173544 - DNA, 15 bp, Homo sapiens
atgaagactcttctg

SEQ ID NO: 173545 - DNA, 15 bp, Homo sapiens
tgaagactcttctga

SEQ ID NO: 173546 - DNA, 15 bp, Homo sapiens
gaagactcttctgat

SEQ ID NO: 173547 - DNA, 15 bp, Homo sapiens
aagactcttctgatt

SEQ ID NO: 173548 - DNA, 15 bp, Homo sapiens
agactcttctgattg

SEQ ID NO: 173549 - DNA, 15 bp, Homo sapiens
gactcttctgattgt

SEQ ID NO: 173550 - DNA, 15 bp, Homo sapiens
actcttctgattgtt

SEQ ID NO: 173551 - DNA, 15 bp, Homo sapiens
ctcttctgattgtta

SEQ ID NO: 173552 - DNA, 15 bp, Homo sapiens
tcttctgattgttat

SEQ ID NO: 173553 - DNA, 15 bp, Homo sapiens
cttctgattgttatt

SEQ ID NO: 173554 - DNA, 15 bp, Homo sapiens
ttctgattgttattt

SEQ ID NO: 173555 - DNA, 15 bp, Homo sapiens
tctgattgttatttt

SEQ ID NO: 173556 - DNA, 15 bp, Homo sapiens
ctgattgttattttc

SEQ ID NO: 173557 - DNA, 15 bp, Homo sapiens
tgattgttattttct

SEQ ID NO: 173558 - DNA, 15 bp, Homo sapiens
gattgttattttctc

SEQ ID NO: 173559 - DNA, 15 bp, Homo sapiens
attgttattttctct

SEQ ID NO: 173560 - DNA, 15 bp, Homo sapiens
ttgttattttctctg

SEQ ID NO: 173561 - DNA, 15 bp, Homo sapiens
tgttattttctctgt

SEQ ID NO: 173562 - DNA, 15 bp, Homo sapiens
gttattttctctgtt

SEQ ID NO: 173563 - DNA, 15 bp, Homo sapiens
ttattttctctgtta

SEQ ID NO: 173564 - DNA, 15 bp, Homo sapiens
tattttctctgttaa

SEQ ID NO: 173565 - DNA, 15 bp, Homo sapiens
attttctctgttaag

SEQ ID NO: 173566 - DNA, 15 bp, Homo sapiens
ttttctctgttaagt

SEQ ID NO: 173567 - DNA, 15 bp, Homo sapiens
tttctctgttaagta

SEQ ID NO: 173568 - DNA, 15 bp, Homo sapiens
ttctctgttaagtaa

SEQ ID NO: 173569 - DNA, 15 bp, Homo sapiens
tctctgttaagtaaa

SEQ ID NO: 173570 - DNA, 15 bp, Homo sapiens
ctctgttaagtaaaa

SEQ ID NO: 173571 - DNA, 15 bp, Homo sapiens
tctgttaagtaaaag

SEQ ID NO: 173572 - DNA, 15 bp, Homo sapiens
ctgttaagtaaaagg

SEQ ID NO: 173573 - DNA, 15 bp, Homo sapiens
tgttaagtaaaagga

SEQ ID NO: 173574 - DNA, 15 bp, Homo sapiens
gttaagtaaaaggaa

SEQ ID NO: 173575 - DNA, 15 bp, Homo sapiens
ttaagtaaaaggaaa

SEQ ID NO: 173576 - DNA, 15 bp, Homo sapiens
taagtaaaaggaaag

SEQ ID NO: 173577 - DNA, 15 bp, Homo sapiens
aagtaaaaggaaagg

SEQ ID NO: 173578 - DNA, 15 bp, Homo sapiens
agtaaaaggaaaggt

SEQ ID NO: 173579 - DNA, 15 bp, Homo sapiens
gtaaaaggaaaggtc

SEQ ID NO: 173580 - DNA, 15 bp, Homo sapiens
taaaaggaaaggtca

SEQ ID NO: 173581 - DNA, 15 bp, Homo sapiens
aaaaggaaaggtcat

SEQ ID NO: 173582 - DNA, 15 bp, Homo sapiens
aaaggaaaggtcatt

SEQ ID NO: 173583 - DNA, 15 bp, Homo sapiens
aaggaaaggtcattg

SEQ ID NO: 173584 - DNA, 15 bp, Homo sapiens
aggaaaggtcattgg

SEQ ID NO: 173585 - DNA, 15 bp, Homo sapiens
ggaaaggtcattggc

SEQ ID NO: 173586 - DNA, 15 bp, Homo sapiens
gaaaggtcattggct

SEQ ID NO: 173587 - DNA, 15 bp, Homo sapiens
aaaggtcattggcta

SEQ ID NO: 173588 - DNA, 15 bp, Homo sapiens
aaggtcattggctaa

SEQ ID NO: 173589 - DNA, 15 bp, Homo sapiens
aggtcattggctaag

SEQ ID NO: 173590 - DNA, 15 bp, Homo sapiens
ggtcattggctaaga

SEQ ID NO: 173591 - DNA, 15 bp, Homo sapiens
gtcattggctaagaa

SEQ ID NO: 173592 - DNA, 15 bp, Homo sapiens
tcattggctaagaat

SEQ ID NO: 173593 - DNA, 15 bp, Homo sapiens
cattggctaagaatg

SEQ ID NO: 173594 - DNA, 15 bp, Homo sapiens
attggctaagaatga

SEQ ID NO: 173595 - DNA, 15 bp, Homo sapiens
ttggctaagaatgaa

SEQ ID NO: 173596 - DNA, 15 bp, Homo sapiens
tggctaagaatgaag

SEQ ID NO: 173597 - DNA, 15 bp, Homo sapiens
ggctaagaatgaaga

SEQ ID NO: 173598 - DNA, 15 bp, Homo sapiens
gctaagaatgaagat

SEQ ID NO: 173599 - DNA, 15 bp, Homo sapiens
ctaagaatgaagatg

SEQ ID NO: 173600 - DNA, 15 bp, Homo sapiens
taagaatgaagatgg

SEQ ID NO: 173601 - DNA, 15 bp, Homo sapiens
aagaatgaagatgga

SEQ ID NO: 173602 - DNA, 15 bp, Homo sapiens
agaatgaagatggac

SEQ ID NO: 173603 - DNA, 15 bp, Homo sapiens
gaatgaagatggacg

SEQ ID NO: 173604 - DNA, 15 bp, Homo sapiens
aatgaagatggacgc

SEQ ID NO: 173605 - DNA, 15 bp, Homo sapiens
atgaagatggacgcg

SEQ ID NO: 173606 - DNA, 15 bp, Homo sapiens
tgaagatggacgcgc

SEQ ID NO: 173607 - DNA, 15 bp, Homo sapiens
gaagatggacgcgca

SEQ ID NO: 173608 - DNA, 15 bp, Homo sapiens
aagatggacgcgcag

SEQ ID NO: 173609 - DNA, 15 bp, Homo sapiens
agatggacgcgcagg

SEQ ID NO: 173610 - DNA, 15 bp, Homo sapiens
gatggacgcgcaggt

SEQ ID NO: 173611 - DNA, 15 bp, Homo sapiens
atggacgcgcaggtg

SEQ ID NO: 173612 - DNA, 15 bp, Homo sapiens
tggacgcgcaggtgc

SEQ ID NO: 173613 - DNA, 15 bp, Homo sapiens
ggacgcgcaggtgct

SEQ ID NO: 173614 - DNA, 15 bp, Homo sapiens
gacgcgcaggtgctg

SEQ ID NO: 173615 - DNA, 15 bp, Homo sapiens
acgcgcaggtgctgg

SEQ ID NO: 173616 - DNA, 15 bp, Homo sapiens
cgcgcaggtgctggg

SEQ ID NO: 173617 - DNA, 15 bp, Homo sapiens
gcgcaggtgctggga

SEQ ID NO: 173618 - DNA, 15 bp, Homo sapiens
cgcaggtgctgggag

SEQ ID NO: 173619 - DNA, 15 bp, Homo sapiens
gcaggtgctgggagt

SEQ ID NO: 173620 - DNA, 15 bp, Homo sapiens
caggtgctgggagtc

SEQ ID NO: 173621 - DNA, 15 bp, Homo sapiens
aggtgctgggagtca

SEQ ID NO: 173622 - DNA, 15 bp, Homo sapiens
ggtgctgggagtcat

SEQ ID NO: 173623 - DNA, 15 bp, Homo sapiens
gtgctgggagtcatc

SEQ ID NO: 173624 - DNA, 15 bp, Homo sapiens
tgctgggagtcatcg

SEQ ID NO: 173625 - DNA, 15 bp, Homo sapiens
gctgggagtcatcga

SEQ ID NO: 173626 - DNA, 15 bp, Homo sapiens
ctgggagtcatcgaa

SEQ ID NO: 173627 - DNA, 15 bp, Homo sapiens
tgggagtcatcgaag

SEQ ID NO: 173628 - DNA, 15 bp, Homo sapiens
gggagtcatcgaaga

SEQ ID NO: 173629 - DNA, 15 bp, Homo sapiens
ggagtcatcgaagag

SEQ ID NO: 173630 - DNA, 15 bp, Homo sapiens
gagtcatcgaagaga

SEQ ID NO: 173631 - DNA, 15 bp, Homo sapiens
agtcatcgaagagaa

SEQ ID NO: 173632 - DNA, 15 bp, Homo sapiens
gtcatcgaagagaat

SEQ ID NO: 173633 - DNA, 15 bp, Homo sapiens
tcatcgaagagaatg

SEQ ID NO: 173634 - DNA, 15 bp, Homo sapiens
catcgaagagaatga

SEQ ID NO: 173635 - DNA, 15 bp, Homo sapiens
atcgaagagaatgaa

SEQ ID NO: 173636 - DNA, 15 bp, Homo sapiens
tcgaagagaatgaaa

SEQ ID NO: 173637 - DNA, 15 bp, Homo sapiens
cgaagagaatgaaag

SEQ ID NO: 173638 - DNA, 15 bp, Homo sapiens
gaagagaatgaaaga

SEQ ID NO: 173639 - DNA, 15 bp, Homo sapiens
aagagaatgaaagaa

SEQ ID NO: 173640 - DNA, 15 bp, Homo sapiens
agagaatgaaagaat

SEQ ID NO: 173641 - DNA, 15 bp, Homo sapiens
gagaatgaaagaatg

SEQ ID NO: 173642 - DNA, 15 bp, Homo sapiens
agaatgaaagaatga

SEQ ID NO: 173643 - DNA, 15 bp, Homo sapiens
gaatgaaagaatgaa

SEQ ID NO: 173644 - DNA, 15 bp, Homo sapiens
aatgaaagaatgaat

SEQ ID NO: 173645 - DNA, 15 bp, Homo sapiens
atgaaagaatgaata

SEQ ID NO: 173646 - DNA, 15 bp, Homo sapiens
tgaaagaatgaataa

SEQ ID NO: 173647 - DNA, 15 bp, Homo sapiens
gaaagaatgaataaa

SEQ ID NO: 173648 - DNA, 15 bp, Homo sapiens
aaagaatgaataaaa

SEQ ID NO: 173649 - DNA, 15 bp, Homo sapiens
aagaatgaataaaat

SEQ ID NO: 173650 - DNA, 15 bp, Homo sapiens
agaatgaataaaata

SEQ ID NO: 173651 - DNA, 15 bp, Homo sapiens
gaatgaataaaatag

SEQ ID NO: 173652 - DNA, 15 bp, Homo sapiens
aatgaataaaataga

SEQ ID NO: 173653 - DNA, 15 bp, Homo sapiens
atgaataaaatagag

SEQ ID NO: 173654 - DNA, 15 bp, Homo sapiens
tgaataaaatagaga

SEQ ID NO: 173655 - DNA, 15 bp, Homo sapiens
gaataaaatagagaa

SEQ ID NO: 173656 - DNA, 15 bp, Homo sapiens
aataaaatagagaaa

SEQ ID NO: 173657 - DNA, 15 bp, Homo sapiens
ataaaatagagaaaa

SEQ ID NO: 173658 - DNA, 15 bp, Homo sapiens
taaaatagagaaaaa

SEQ ID NO: 173659 - DNA, 15 bp, Homo sapiens
aaaatagagaaaaat

SEQ ID NO: 173660 - DNA, 15 bp, Homo sapiens
aaatagagaaaaata

SEQ ID NO: 173661 - DNA, 15 bp, Homo sapiens
aatagagaaaaatac

SEQ ID NO: 173662 - DNA, 15 bp, Homo sapiens
atagagaaaaataca

SEQ ID NO: 173663 - DNA, 15 bp, Homo sapiens
tagagaaaaatacaa

SEQ ID NO: 173664 - DNA, 15 bp, Homo sapiens
agagaaaaatacaat

SEQ ID NO: 173665 - DNA, 15 bp, Homo sapiens
gagaaaaatacaatg

SEQ ID NO: 173666 - DNA, 15 bp, Homo sapiens
agaaaaatacaatgc

SEQ ID NO: 173667 - DNA, 15 bp, Homo sapiens
gaaaaatacaatgct

SEQ ID NO: 173668 - DNA, 15 bp, Homo sapiens
aaaaatacaatgcta

SEQ ID NO: 173669 - DNA, 15 bp, Homo sapiens
aaaatacaatgctat

SEQ ID NO: 173670 - DNA, 15 bp, Homo sapiens
aaatacaatgctatt

SEQ ID NO: 173671 - DNA, 15 bp, Homo sapiens
aatacaatgctatta

SEQ ID NO: 173672 - DNA, 15 bp, Homo sapiens
atacaatgctattat

SEQ ID NO: 173673 - DNA, 15 bp, Homo sapiens
tacaatgctattata

SEQ ID NO: 173674 - DNA, 15 bp, Homo sapiens
acaatgctattatat

SEQ ID NO: 173675 - DNA, 15 bp, Homo sapiens
caatgctattatata

SEQ ID NO: 173676 - DNA, 15 bp, Homo sapiens
aatgctattatataa

SEQ ID NO: 173677 - DNA, 15 bp, Homo sapiens
atgctattatataaa

SEQ ID NO: 173678 - DNA, 15 bp, Homo sapiens
tgctattatataaac

SEQ ID NO: 173679 - DNA, 15 bp, Homo sapiens
gctattatataaacc

SEQ ID NO: 173680 - DNA, 15 bp, Homo sapiens
ctattatataaacct

SEQ ID NO: 173681 - DNA, 15 bp, Homo sapiens
tattatataaaccta

SEQ ID NO: 173682 - DNA, 15 bp, Homo sapiens
attatataaacctat

SEQ ID NO: 173683 - DNA, 15 bp, Homo sapiens
ttatataaacctata

SEQ ID NO: 173684 - DNA, 15 bp, Homo sapiens
tatataaacctatac

SEQ ID NO: 173685 - DNA, 15 bp, Homo sapiens
atataaacctataca

SEQ ID NO: 173686 - DNA, 15 bp, Homo sapiens
tataaacctatacat

SEQ ID NO: 173687 - DNA, 15 bp, Homo sapiens
ataaacctatacatt

SEQ ID NO: 173688 - DNA, 15 bp, Homo sapiens
taaacctatacattt

SEQ ID NO: 173689 - DNA, 15 bp, Homo sapiens
aaacctatacattta

SEQ ID NO: 173690 - DNA, 15 bp, Homo sapiens
aacctatacatttaa

SEQ ID NO: 173691 - DNA, 15 bp, Homo sapiens
acctatacatttaaa

SEQ ID NO: 173692 - DNA, 15 bp, Homo sapiens
cctatacatttaaat

SEQ ID NO: 173693 - DNA, 15 bp, Homo sapiens
ctatacatttaaatt

SEQ ID NO: 173694 - DNA, 15 bp, Homo sapiens
tatacatttaaatta

SEQ ID NO: 173695 - DNA, 15 bp, Homo sapiens
atacatttaaattac

SEQ ID NO: 173696 - DNA, 15 bp, Homo sapiens
tacatttaaattact

SEQ ID NO: 173697 - DNA, 15 bp, Homo sapiens
acatttaaattactt

SEQ ID NO: 173698 - DNA, 15 bp, Homo sapiens
catttaaattacttt

SEQ ID NO: 173699 - DNA, 15 bp, Homo sapiens
atttaaattactttc

SEQ ID NO: 173700 - DNA, 15 bp, Homo sapiens
tttaaattactttcc

SEQ ID NO: 173701 - DNA, 15 bp, Homo sapiens
ttaaattactttcct

SEQ ID NO: 173702 - DNA, 15 bp, Homo sapiens
taaattactttcctc

SEQ ID NO: 173703 - DNA, 15 bp, Homo sapiens
aaattactttcctct

SEQ ID NO: 173704 - DNA, 15 bp, Homo sapiens
aattactttcctctt

SEQ ID NO: 173705 - DNA, 15 bp, Homo sapiens
attactttcctcttc

SEQ ID NO: 173706 - DNA, 15 bp, Homo sapiens
ttactttcctcttca

SEQ ID NO: 173707 - DNA, 15 bp, Homo sapiens
tactttcctcttcaa

SEQ ID NO: 173708 - DNA, 15 bp, Homo sapiens
actttcctcttcaaa

SEQ ID NO: 173709 - DNA, 15 bp, Homo sapiens
ctttcctcttcaaat

SEQ ID NO: 173710 - DNA, 15 bp, Homo sapiens
tttcctcttcaaatt

SEQ ID NO: 173711 - DNA, 15 bp, Homo sapiens
ttcctcttcaaatta

SEQ ID NO: 173712 - DNA, 15 bp, Homo sapiens
tcctcttcaaattag

SEQ ID NO: 173713 - DNA, 15 bp, Homo sapiens
cctcttcaaattaga

SEQ ID NO: 173714 - DNA, 15 bp, Homo sapiens
ctcttcaaattagac

SEQ ID NO: 173715 - DNA, 15 bp, Homo sapiens
tcttcaaattagacc

SEQ ID NO: 173716 - DNA, 15 bp, Homo sapiens
cttcaaattagaccc

SEQ ID NO: 173717 - DNA, 15 bp, Homo sapiens
ttcaaattagacccc

SEQ ID NO: 173718 - DNA, 15 bp, Homo sapiens
tcaaattagaccccc

SEQ ID NO: 173719 - DNA, 15 bp, Homo sapiens
caaattagaccccct

SEQ ID NO: 173720 - DNA, 15 bp, Homo sapiens
aaattagaccccctg

SEQ ID NO: 173721 - DNA, 15 bp, Homo sapiens
aattagaccccctgg

SEQ ID NO: 173722 - DNA, 15 bp, Homo sapiens
attagaccccctgga

SEQ ID NO: 173723 - DNA, 15 bp, Homo sapiens
ttagaccccctggaa

SEQ ID NO: 173724 - DNA, 15 bp, Homo sapiens
tagaccccctggaag

SEQ ID NO: 173725 - DNA, 15 bp, Homo sapiens
agaccccctggaagg

SEQ ID NO: 173726 - DNA, 15 bp, Homo sapiens
gaccccctggaaggc

SEQ ID NO: 173727 - DNA, 15 bp, Homo sapiens
accccctggaaggca

SEQ ID NO: 173728 - DNA, 15 bp, Homo sapiens
ccccctggaaggcaa

SEQ ID NO: 173729 - DNA, 15 bp, Homo sapiens
cccctggaaggcaaa

SEQ ID NO: 173730 - DNA, 15 bp, Homo sapiens
ccctggaaggcaaat

SEQ ID NO: 173731 - DNA, 15 bp, Homo sapiens
cctggaaggcaaatc

SEQ ID NO: 173732 - DNA, 15 bp, Homo sapiens
ctggaaggcaaatct

SEQ ID NO: 173733 - DNA, 15 bp, Homo sapiens
tggaaggcaaatctc

SEQ ID NO: 173734 - DNA, 15 bp, Homo sapiens
ggaaggcaaatctct

SEQ ID NO: 173735 - DNA, 15 bp, Homo sapiens
gaaggcaaatctctg

SEQ ID NO: 173736 - DNA, 15 bp, Homo sapiens
aaggcaaatctctgt

SEQ ID NO: 173737 - DNA, 15 bp, Homo sapiens
aggcaaatctctgtc

SEQ ID NO: 173738 - DNA, 15 bp, Homo sapiens
ggcaaatctctgtca

SEQ ID NO: 173739 - DNA, 15 bp, Homo sapiens
gcaaatctctgtcat

SEQ ID NO: 173740 - DNA, 15 bp, Homo sapiens
caaatctctgtcatg

SEQ ID NO: 173741 - DNA, 15 bp, Homo sapiens
aaatctctgtcatgt

SEQ ID NO: 173742 - DNA, 15 bp, Homo sapiens
aatctctgtcatgtt

SEQ ID NO: 173743 - DNA, 15 bp, Homo sapiens
atctctgtcatgtta

SEQ ID NO: 173744 - DNA, 15 bp, Homo sapiens
tctctgtcatgttaa

SEQ ID NO: 173745 - DNA, 15 bp, Homo sapiens
ctctgtcatgttaag

SEQ ID NO: 173746 - DNA, 15 bp, Homo sapiens
tctgtcatgttaagt

SEQ ID NO: 173747 - DNA, 15 bp, Homo sapiens
ctgtcatgttaagtt

SEQ ID NO: 173748 - DNA, 15 bp, Homo sapiens
tgtcatgttaagttt

SEQ ID NO: 173749 - DNA, 15 bp, Homo sapiens
gtcatgttaagtttt

SEQ ID NO: 173750 - DNA, 15 bp, Homo sapiens
tcatgttaagtttta

SEQ ID NO: 173751 - DNA, 15 bp, Homo sapiens
catgttaagttttag

SEQ ID NO: 173752 - DNA, 15 bp, Homo sapiens
atgttaagttttagg

SEQ ID NO: 173753 - DNA, 15 bp, Homo sapiens
tgttaagttttagga

SEQ ID NO: 173754 - DNA, 15 bp, Homo sapiens
gttaagttttaggaa

SEQ ID NO: 173755 - DNA, 15 bp, Homo sapiens
ttaagttttaggaaa

SEQ ID NO: 173756 - DNA, 15 bp, Homo sapiens
taagttttaggaaaa

SEQ ID NO: 173757 - DNA, 15 bp, Homo sapiens
aagttttaggaaaag

SEQ ID NO: 173758 - DNA, 15 bp, Homo sapiens
agttttaggaaaagt

SEQ ID NO: 173759 - DNA, 15 bp, Homo sapiens
gttttaggaaaagtc

SEQ ID NO: 173760 - DNA, 15 bp, Homo sapiens
ttttaggaaaagtca

SEQ ID NO: 173761 - DNA, 15 bp, Homo sapiens
tttaggaaaagtcat

SEQ ID NO: 173762 - DNA, 15 bp, Homo sapiens
ttaggaaaagtcata

SEQ ID NO: 173763 - DNA, 15 bp, Homo sapiens
taggaaaagtcataa

SEQ ID NO: 173764 - DNA, 15 bp, Homo sapiens
aggaaaagtcataat

SEQ ID NO: 173765 - DNA, 15 bp, Homo sapiens
ggaaaagtcataatc

SEQ ID NO: 173766 - DNA, 15 bp, Homo sapiens
gaaaagtcataatct

SEQ ID NO: 173767 - DNA, 15 bp, Homo sapiens
aaaagtcataatcta

SEQ ID NO: 173768 - DNA, 15 bp, Homo sapiens
aaagtcataatctac

SEQ ID NO: 173769 - DNA, 15 bp, Homo sapiens
aagtcataatctact

SEQ ID NO: 173770 - DNA, 15 bp, Homo sapiens
agtcataatctactt

SEQ ID NO: 173771 - DNA, 15 bp, Homo sapiens
gtcataatctacttg

SEQ ID NO: 173772 - DNA, 15 bp, Homo sapiens
tcataatctacttgg

SEQ ID NO: 173773 - DNA, 15 bp, Homo sapiens
cataatctacttgga

SEQ ID NO: 173774 - DNA, 15 bp, Homo sapiens
ataatctacttggag

SEQ ID NO: 173775 - DNA, 15 bp, Homo sapiens
taatctacttggagc

SEQ ID NO: 173776 - DNA, 15 bp, Homo sapiens
aatctacttggagct

SEQ ID NO: 173777 - DNA, 15 bp, Homo sapiens
atctacttggagcta

SEQ ID NO: 173778 - DNA, 15 bp, Homo sapiens
tctacttggagctaa

SEQ ID NO: 173779 - DNA, 15 bp, Homo sapiens
ctacttggagctaag

SEQ ID NO: 173780 - DNA, 15 bp, Homo sapiens
tacttggagctaagt

SEQ ID NO: 173781 - DNA, 15 bp, Homo sapiens
acttggagctaagta

SEQ ID NO: 173782 - DNA, 15 bp, Homo sapiens
cttggagctaagtat

SEQ ID NO: 173783 - DNA, 15 bp, Homo sapiens
ttggagctaagtatg

SEQ ID NO: 173784 - DNA, 15 bp, Homo sapiens
tggagctaagtatga

SEQ ID NO: 173785 - DNA, 15 bp, Homo sapiens
ggagctaagtatgaa

SEQ ID NO: 173786 - DNA, 15 bp, Homo sapiens
gagctaagtatgaag

SEQ ID NO: 173787 - DNA, 15 bp, Homo sapiens
agctaagtatgaaga

SEQ ID NO: 173788 - DNA, 15 bp, Homo sapiens
gctaagtatgaagaa

SEQ ID NO: 173789 - DNA, 15 bp, Homo sapiens
ctaagtatgaagaat

SEQ ID NO: 173790 - DNA, 15 bp, Homo sapiens
taagtatgaagaata

SEQ ID NO: 173791 - DNA, 15 bp, Homo sapiens
aagtatgaagaataa

SEQ ID NO: 173792 - DNA, 15 bp, Homo sapiens
agtatgaagaataag

SEQ ID NO: 173793 - DNA, 15 bp, Homo sapiens
gtatgaagaataagg

SEQ ID NO: 173794 - DNA, 15 bp, Homo sapiens
tatgaagaataaggt

SEQ ID NO: 173795 - DNA, 15 bp, Homo sapiens
atgaagaataaggta

SEQ ID NO: 173796 - DNA, 15 bp, Homo sapiens
tgaagaataaggtat

SEQ ID NO: 173797 - DNA, 15 bp, Homo sapiens
gaagaataaggtata

SEQ ID NO: 173798 - DNA, 15 bp, Homo sapiens
aagaataaggtatat

SEQ ID NO: 173799 - DNA, 15 bp, Homo sapiens
agaataaggtatatg

SEQ ID NO: 173800 - DNA, 15 bp, Homo sapiens
gaataaggtatatga

SEQ ID NO: 173801 - DNA, 15 bp, Homo sapiens
aataaggtatatgat

SEQ ID NO: 173802 - DNA, 15 bp, Homo sapiens
ataaggtatatgatt

SEQ ID NO: 173803 - DNA, 15 bp, Homo sapiens
taaggtatatgattt

SEQ ID NO: 173804 - DNA, 15 bp, Homo sapiens
aaggtatatgattta

SEQ ID NO: 173805 - DNA, 15 bp, Homo sapiens
aggtatatgatttaa

SEQ ID NO: 173806 - DNA, 15 bp, Homo sapiens
ggtatatgatttaaa

SEQ ID NO: 173807 - DNA, 15 bp, Homo sapiens
gtatatgatttaaac

SEQ ID NO: 173808 - DNA, 15 bp, Homo sapiens
tatatgatttaaacc

SEQ ID NO: 173809 - DNA, 15 bp, Homo sapiens
atatgatttaaacca

SEQ ID NO: 173810 - DNA, 15 bp, Homo sapiens
tatgatttaaaccac

SEQ ID NO: 173811 - DNA, 15 bp, Homo sapiens
atgatttaaaccaca

SEQ ID NO: 173812 - DNA, 15 bp, Homo sapiens
tgatttaaaccacat

SEQ ID NO: 173813 - DNA, 15 bp, Homo sapiens
gatttaaaccacata

SEQ ID NO: 173814 - DNA, 15 bp, Homo sapiens
atttaaaccacataa

SEQ ID NO: 173815 - DNA, 15 bp, Homo sapiens
tttaaaccacataat

SEQ ID NO: 173816 - DNA, 15 bp, Homo sapiens
ttaaaccacataatt

SEQ ID NO: 173817 - DNA, 15 bp, Homo sapiens
taaaccacataattc

SEQ ID NO: 173818 - DNA, 15 bp, Homo sapiens
aaaccacataattct

SEQ ID NO: 173819 - DNA, 15 bp, Homo sapiens
aaccacataattcta

SEQ ID NO: 173820 - DNA, 15 bp, Homo sapiens
accacataattctat

SEQ ID NO: 173821 - DNA, 15 bp, Homo sapiens
ccacataattctatt

SEQ ID NO: 173822 - DNA, 15 bp, Homo sapiens
cacataattctattt

SEQ ID NO: 173823 - DNA, 15 bp, Homo sapiens
acataattctatttt

SEQ ID NO: 173824 - DNA, 15 bp, Homo sapiens
cataattctattttt

SEQ ID NO: 173825 - DNA, 15 bp, Homo sapiens
ataattctatttttg

SEQ ID NO: 173826 - DNA, 15 bp, Homo sapiens
taattctatttttgc

SEQ ID NO: 173827 - DNA, 15 bp, Homo sapiens
aattctatttttgct

SEQ ID NO: 173828 - DNA, 15 bp, Homo sapiens
attctatttttgctt

SEQ ID NO: 173829 - DNA, 15 bp, Homo sapiens
ttctatttttgctta

SEQ ID NO: 173830 - DNA, 15 bp, Homo sapiens
tctatttttgcttaa

SEQ ID NO: 173831 - DNA, 15 bp, Homo sapiens
ctatttttgcttaaa

SEQ ID NO: 173832 - DNA, 15 bp, Homo sapiens
tatttttgcttaaac

SEQ ID NO: 173833 - DNA, 15 bp, Homo sapiens
atttttgcttaaacc

SEQ ID NO: 173834 - DNA, 15 bp, Homo sapiens
tttttgcttaaaccg

SEQ ID NO: 173835 - DNA, 15 bp, Homo sapiens
ttttgcttaaaccgg

SEQ ID NO: 173836 - DNA, 15 bp, Homo sapiens
tttgcttaaaccggg

SEQ ID NO: 173837 - DNA, 15 bp, Homo sapiens
ttgcttaaaccgggg

SEQ ID NO: 173838 - DNA, 15 bp, Homo sapiens
tgcttaaaccgggga

SEQ ID NO: 173839 - DNA, 15 bp, Homo sapiens
gcttaaaccggggaa

SEQ ID NO: 173840 - DNA, 15 bp, Homo sapiens
cttaaaccggggaag

SEQ ID NO: 173841 - DNA, 15 bp, Homo sapiens
ttaaaccggggaagc

SEQ ID NO: 173842 - DNA, 15 bp, Homo sapiens
taaaccggggaagcc

SEQ ID NO: 173843 - DNA, 15 bp, Homo sapiens
aaaccggggaagcct

SEQ ID NO: 173844 - DNA, 15 bp, Homo sapiens
aaccggggaagcctt

SEQ ID NO: 173845 - DNA, 15 bp, Homo sapiens
accggggaagccttt

SEQ ID NO: 173846 - DNA, 15 bp, Homo sapiens
ccggggaagccttta

SEQ ID NO: 173847 - DNA, 15 bp, Homo sapiens
cggggaagcctttaa

SEQ ID NO: 173848 - DNA, 15 bp, Homo sapiens
ggggaagcctttaag

SEQ ID NO: 173849 - DNA, 15 bp, Homo sapiens
gggaagcctttaagg

SEQ ID NO: 173850 - DNA, 15 bp, Homo sapiens
ggaagcctttaaggt

SEQ ID NO: 173851 - DNA, 15 bp, Homo sapiens
gaagcctttaaggta

SEQ ID NO: 173852 - DNA, 15 bp, Homo sapiens
aagcctttaaggtaa

SEQ ID NO: 173853 - DNA, 15 bp, Homo sapiens
agcctttaaggtaac

SEQ ID NO: 173854 - DNA, 15 bp, Homo sapiens
gcctttaaggtaacg

SEQ ID NO: 173855 - DNA, 15 bp, Homo sapiens
cctttaaggtaacgt

SEQ ID NO: 173856 - DNA, 15 bp, Homo sapiens
ctttaaggtaacgta

SEQ ID NO: 173857 - DNA, 15 bp, Homo sapiens
tttaaggtaacgtag

SEQ ID NO: 173858 - DNA, 15 bp, Homo sapiens
ttaaggtaacgtaga

SEQ ID NO: 173859 - DNA, 15 bp, Homo sapiens
taaggtaacgtagag

SEQ ID NO: 173860 - DNA, 15 bp, Homo sapiens
aaggtaacgtagagt

SEQ ID NO: 173861 - DNA, 15 bp, Homo sapiens
aggtaacgtagagtg

SEQ ID NO: 173862 - DNA, 15 bp, Homo sapiens
ggtaacgtagagtgt

SEQ ID NO: 173863 - DNA, 15 bp, Homo sapiens
gtaacgtagagtgta

SEQ ID NO: 173864 - DNA, 15 bp, Homo sapiens
taacgtagagtgtac

SEQ ID NO: 173865 - DNA, 15 bp, Homo sapiens
aacgtagagtgtacc

SEQ ID NO: 173866 - DNA, 15 bp, Homo sapiens
acgtagagtgtaccc

SEQ ID NO: 173867 - DNA, 15 bp, Homo sapiens
cgtagagtgtaccca

SEQ ID NO: 173868 - DNA, 15 bp, Homo sapiens
gtagagtgtacccat

SEQ ID NO: 173869 - DNA, 15 bp, Homo sapiens
tagagtgtacccatt

SEQ ID NO: 173870 - DNA, 15 bp, Homo sapiens
agagtgtacccatta

SEQ ID NO: 173871 - DNA, 15 bp, Homo sapiens
gagtgtacccattaa

SEQ ID NO: 173872 - DNA, 15 bp, Homo sapiens
agtgtacccattaaa

SEQ ID NO: 173873 - DNA, 15 bp, Homo sapiens
gtgtacccattaaaa

SEQ ID NO: 173874 - DNA, 15 bp, Homo sapiens
tgtacccattaaaaa

SEQ ID NO: 173875 - DNA, 15 bp, Homo sapiens
gtacccattaaaaaa

SEQ ID NO: 173876 - DNA, 15 bp, Homo sapiens
tacccattaaaaaag

SEQ ID NO: 173877 - DNA, 15 bp, Homo sapiens
acccattaaaaaaga

SEQ ID NO: 173878 - DNA, 15 bp, Homo sapiens
cccattaaaaaagat

SEQ ID NO: 173879 - DNA, 15 bp, Homo sapiens
ccattaaaaaagata

SEQ ID NO: 173880 - DNA, 15 bp, Homo sapiens
cattaaaaaagataa

SEQ ID NO: 173881 - DNA, 15 bp, Homo sapiens
attaaaaaagataaa

SEQ ID NO: 173882 - DNA, 15 bp, Homo sapiens
ttaaaaaagataaaa

SEQ ID NO: 173883 - DNA, 15 bp, Homo sapiens
taaaaaagataaaaa

SEQ ID NO: 173884 - DNA, 15 bp, Homo sapiens
aaaaaagataaaaat

SEQ ID NO: 173885 - DNA, 15 bp, Homo sapiens
aaaaagataaaaatg

SEQ ID NO: 173886 - DNA, 15 bp, Homo sapiens
aaaagataaaaatgt

SEQ ID NO: 173887 - DNA, 15 bp, Homo sapiens
aaagataaaaatgtc

SEQ ID NO: 173888 - DNA, 15 bp, Homo sapiens
aagataaaaatgtca

SEQ ID NO: 173889 - DNA, 15 bp, Homo sapiens
agataaaaatgtcag

SEQ ID NO: 173890 - DNA, 15 bp, Homo sapiens
gataaaaatgtcagc

SEQ ID NO: 173891 - DNA, 15 bp, Homo sapiens
ataaaaatgtcagct

SEQ ID NO: 173892 - DNA, 15 bp, Homo sapiens
taaaaatgtcagctt

SEQ ID NO: 173893 - DNA, 15 bp, Homo sapiens
aaaaatgtcagcttc

SEQ ID NO: 173894 - DNA, 15 bp, Homo sapiens
aaaatgtcagcttcc

SEQ ID NO: 173895 - DNA, 15 bp, Homo sapiens
aaatgtcagcttccc

SEQ ID NO: 173896 - DNA, 15 bp, Homo sapiens
aatgtcagcttcccc

SEQ ID NO: 173897 - DNA, 15 bp, Homo sapiens
atgtcagcttcccct

SEQ ID NO: 173898 - DNA, 15 bp, Homo sapiens
tgtcagcttcccctt

SEQ ID NO: 173899 - DNA, 15 bp, Homo sapiens
gtcagcttccccttc

SEQ ID NO: 173900 - DNA, 15 bp, Homo sapiens
tcagcttccccttcc

SEQ ID NO: 173901 - DNA, 15 bp, Homo sapiens
cagcttccccttccc

SEQ ID NO: 173902 - DNA, 15 bp, Homo sapiens
agcttccccttccct

SEQ ID NO: 173903 - DNA, 15 bp, Homo sapiens
gcttccccttccctt

SEQ ID NO: 173904 - DNA, 15 bp, Homo sapiens
cttccccttcccttt

SEQ ID NO: 173905 - DNA, 15 bp, Homo sapiens
ttccccttcccttta

SEQ ID NO: 173906 - DNA, 15 bp, Homo sapiens
tccccttccctttaa

SEQ ID NO: 173907 - DNA, 15 bp, Homo sapiens
ccccttccctttaaa

SEQ ID NO: 173908 - DNA, 15 bp, Homo sapiens
cccttccctttaaat

SEQ ID NO: 173909 - DNA, 15 bp, Homo sapiens
ccttccctttaaata

SEQ ID NO: 173910 - DNA, 15 bp, Homo sapiens
cttccctttaaatat

SEQ ID NO: 173911 - DNA, 15 bp, Homo sapiens
ttccctttaaatata

SEQ ID NO: 173912 - DNA, 15 bp, Homo sapiens
tccctttaaatatag

SEQ ID NO: 173913 - DNA, 15 bp, Homo sapiens
ccctttaaatatagt

SEQ ID NO: 173914 - DNA, 15 bp, Homo sapiens
cctttaaatatagta

SEQ ID NO: 173915 - DNA, 15 bp, Homo sapiens
ctttaaatatagtaa

SEQ ID NO: 173916 - DNA, 15 bp, Homo sapiens
tttaaatatagtaag

SEQ ID NO: 173917 - DNA, 15 bp, Homo sapiens
ttaaatatagtaagg

SEQ ID NO: 173918 - DNA, 15 bp, Homo sapiens
taaatatagtaaggc

SEQ ID NO: 173919 - DNA, 15 bp, Homo sapiens
aaatatagtaaggct

SEQ ID NO: 173920 - DNA, 15 bp, Homo sapiens
aatatagtaaggctc

SEQ ID NO: 173921 - DNA, 15 bp, Homo sapiens
atatagtaaggctca

SEQ ID NO: 173922 - DNA, 15 bp, Homo sapiens
tatagtaaggctcaa

SEQ ID NO: 173923 - DNA, 15 bp, Homo sapiens
atagtaaggctcaaa

SEQ ID NO: 173924 - DNA, 15 bp, Homo sapiens
tagtaaggctcaaag

SEQ ID NO: 173925 - DNA, 15 bp, Homo sapiens
agtaaggctcaaagg

SEQ ID NO: 173926 - DNA, 15 bp, Homo sapiens
gtaaggctcaaaggt

SEQ ID NO: 173927 - DNA, 15 bp, Homo sapiens
taaggctcaaaggta

SEQ ID NO: 173928 - DNA, 15 bp, Homo sapiens
aaggctcaaaggtaa

SEQ ID NO: 173929 - DNA, 15 bp, Homo sapiens
aggctcaaaggtaat

SEQ ID NO: 173930 - DNA, 15 bp, Homo sapiens
ggctcaaaggtaatt

SEQ ID NO: 173931 - DNA, 15 bp, Homo sapiens
gctcaaaggtaattg

SEQ ID NO: 173932 - DNA, 15 bp, Homo sapiens
ctcaaaggtaattga

SEQ ID NO: 173933 - DNA, 15 bp, Homo sapiens
tcaaaggtaattgat

SEQ ID NO: 173934 - DNA, 15 bp, Homo sapiens
caaaggtaattgatg

SEQ ID NO: 173935 - DNA, 15 bp, Homo sapiens
aaaggtaattgatgt

SEQ ID NO: 173936 - DNA, 15 bp, Homo sapiens
aaggtaattgatgtt

SEQ ID NO: 173937 - DNA, 15 bp, Homo sapiens
aggtaattgatgttc

SEQ ID NO: 173938 - DNA, 15 bp, Homo sapiens
ggtaattgatgttca

SEQ ID NO: 173939 - DNA, 15 bp, Homo sapiens
gtaattgatgttcat

SEQ ID NO: 173940 - DNA, 15 bp, Homo sapiens
taattgatgttcata

SEQ ID NO: 173941 - DNA, 15 bp, Homo sapiens
aattgatgttcataa

SEQ ID NO: 173942 - DNA, 15 bp, Homo sapiens
attgatgttcataac

SEQ ID NO: 173943 - DNA, 15 bp, Homo sapiens
ttgatgttcataacc

SEQ ID NO: 173944 - DNA, 15 bp, Homo sapiens
tgatgttcataaccc

SEQ ID NO: 173945 - DNA, 15 bp, Homo sapiens
gatgttcataaccct

SEQ ID NO: 173946 - DNA, 15 bp, Homo sapiens
atgttcataacccta

SEQ ID NO: 173947 - DNA, 15 bp, Homo sapiens
tgttcataaccctaa

SEQ ID NO: 173948 - DNA, 15 bp, Homo sapiens
gttcataaccctaag

SEQ ID NO: 173949 - DNA, 15 bp, Homo sapiens
ttcataaccctaagg

SEQ ID NO: 173950 - DNA, 15 bp, Homo sapiens
tcataaccctaaggt

SEQ ID NO: 173951 - DNA, 15 bp, Homo sapiens
cataaccctaaggta

SEQ ID NO: 173952 - DNA, 15 bp, Homo sapiens
ataaccctaaggtac

SEQ ID NO: 173953 - DNA, 15 bp, Homo sapiens
taaccctaaggtact

SEQ ID NO: 173954 - DNA, 15 bp, Homo sapiens
aaccctaaggtacta

SEQ ID NO: 173955 - DNA, 15 bp, Homo sapiens
accctaaggtactat

SEQ ID NO: 173956 - DNA, 15 bp, Homo sapiens
ccctaaggtactata

SEQ ID NO: 173957 - DNA, 15 bp, Homo sapiens
cctaaggtactataa

SEQ ID NO: 173958 - DNA, 15 bp, Homo sapiens
ctaaggtactataac

SEQ ID NO: 173959 - DNA, 15 bp, Homo sapiens
taaggtactataaca

SEQ ID NO: 173960 - DNA, 15 bp, Homo sapiens
aaggtactataacag

SEQ ID NO: 173961 - DNA, 15 bp, Homo sapiens
aggtactataacagt

SEQ ID NO: 173962 - DNA, 15 bp, Homo sapiens
ggtactataacagtc

SEQ ID NO: 173963 - DNA, 15 bp, Homo sapiens
gtactataacagtct

SEQ ID NO: 173964 - DNA, 15 bp, Homo sapiens
tactataacagtctg

SEQ ID NO: 173965 - DNA, 15 bp, Homo sapiens
actataacagtctga

SEQ ID NO: 173966 - DNA, 15 bp, Homo sapiens
ctataacagtctgaa

SEQ ID NO: 173967 - DNA, 15 bp, Homo sapiens
tataacagtctgaag

SEQ ID NO: 173968 - DNA, 15 bp, Homo sapiens
ataacagtctgaagc

SEQ ID NO: 173969 - DNA, 15 bp, Homo sapiens
taacagtctgaagca

SEQ ID NO: 173970 - DNA, 15 bp, Homo sapiens
aacagtctgaagcaa

SEQ ID NO: 173971 - DNA, 15 bp, Homo sapiens
acagtctgaagcaaa

SEQ ID NO: 173972 - DNA, 15 bp, Homo sapiens
cagtctgaagcaaaa

SEQ ID NO: 173973 - DNA, 15 bp, Homo sapiens
agtctgaagcaaaat

SEQ ID NO: 173974 - DNA, 15 bp, Homo sapiens
gtctgaagcaaaata

SEQ ID NO: 173975 - DNA, 15 bp, Homo sapiens
tctgaagcaaaatat

SEQ ID NO: 173976 - DNA, 15 bp, Homo sapiens
ctgaagcaaaatatt

SEQ ID NO: 173977 - DNA, 15 bp, Homo sapiens
tgaagcaaaatatta

SEQ ID NO: 173978 - DNA, 15 bp, Homo sapiens
gaagcaaaatattaa

SEQ ID NO: 173979 - DNA, 15 bp, Homo sapiens
aagcaaaatattaaa

SEQ ID NO: 173980 - DNA, 15 bp, Homo sapiens
agcaaaatattaaat

SEQ ID NO: 173981 - DNA, 15 bp, Homo sapiens
gcaaaatattaaatg

SEQ ID NO: 173982 - DNA, 15 bp, Homo sapiens
caaaatattaaatgt

SEQ ID NO: 173983 - DNA, 15 bp, Homo sapiens
aaaatattaaatgtc

SEQ ID NO: 173984 - DNA, 15 bp, Homo sapiens
aaatattaaatgtct

SEQ ID NO: 173985 - DNA, 15 bp, Homo sapiens
aatattaaatgtctt

SEQ ID NO: 173986 - DNA, 15 bp, Homo sapiens
atattaaatgtcttc

SEQ ID NO: 173987 - DNA, 15 bp, Homo sapiens
tattaaatgtcttct

SEQ ID NO: 173988 - DNA, 15 bp, Homo sapiens
attaaatgtcttctg

SEQ ID NO: 173989 - DNA, 15 bp, Homo sapiens
ttaaatgtcttctgt

SEQ ID NO: 173990 - DNA, 15 bp, Homo sapiens
taaatgtcttctgta

SEQ ID NO: 173991 - DNA, 15 bp, Homo sapiens
aaatgtcttctgtag

SEQ ID NO: 173992 - DNA, 15 bp, Homo sapiens
aatgtcttctgtagt

SEQ ID NO: 173993 - DNA, 15 bp, Homo sapiens
atgtcttctgtagta

SEQ ID NO: 173994 - DNA, 15 bp, Homo sapiens
tgtcttctgtagtat

SEQ ID NO: 173995 - DNA, 15 bp, Homo sapiens
gtcttctgtagtatt

SEQ ID NO: 173996 - DNA, 15 bp, Homo sapiens
tcttctgtagtattt

SEQ ID NO: 173997 - DNA, 15 bp, Homo sapiens
cttctgtagtatttt

SEQ ID NO: 173998 - DNA, 15 bp, Homo sapiens
ttctgtagtatttta

SEQ ID NO: 173999 - DNA, 15 bp, Homo sapiens
tctgtagtattttag

SEQ ID NO: 174000 - DNA, 15 bp, Homo sapiens
ctgtagtattttagt

SEQ ID NO: 174001 - DNA, 15 bp, Homo sapiens
tgtagtattttagtt

SEQ ID NO: 174002 - DNA, 15 bp, Homo sapiens
gtagtattttagtta

SEQ ID NO: 174003 - DNA, 15 bp, Homo sapiens
tagtattttagttaa

SEQ ID NO: 174004 - DNA, 15 bp, Homo sapiens
agtattttagttaac

SEQ ID NO: 174005 - DNA, 15 bp, Homo sapiens
gtattttagttaact

SEQ ID NO: 174006 - DNA, 15 bp, Homo sapiens
tattttagttaactt

SEQ ID NO: 174007 - DNA, 15 bp, Homo sapiens
attttagttaacttt

SEQ ID NO: 174008 - DNA, 15 bp, Homo sapiens
ttttagttaactttt

SEQ ID NO: 174009 - DNA, 15 bp, Homo sapiens
tttagttaactttta

SEQ ID NO: 174010 - DNA, 15 bp, Homo sapiens
ttagttaacttttaa

SEQ ID NO: 174011 - DNA, 15 bp, Homo sapiens
tagttaacttttaat

SEQ ID NO: 174012 - DNA, 15 bp, Homo sapiens
agttaacttttaatt

SEQ ID NO: 174013 - DNA, 15 bp, Homo sapiens
gttaacttttaattt

SEQ ID NO: 174014 - DNA, 15 bp, Homo sapiens
ttaacttttaatttt

SEQ ID NO: 174015 - DNA, 15 bp, Homo sapiens
taacttttaatttta

SEQ ID NO: 174016 - DNA, 15 bp, Homo sapiens
aacttttaattttat

SEQ ID NO: 174017 - DNA, 15 bp, Homo sapiens
acttttaattttatt

SEQ ID NO: 174018 - DNA, 15 bp, Homo sapiens
cttttaattttattg

SEQ ID NO: 174019 - DNA, 15 bp, Homo sapiens
ttttaattttattgg

SEQ ID NO: 174020 - DNA, 15 bp, Homo sapiens
tttaattttattggt

SEQ ID NO: 174021 - DNA, 15 bp, Homo sapiens
ttaattttattggta

SEQ ID NO: 174022 - DNA, 15 bp, Homo sapiens
taattttattggtaa

SEQ ID NO: 174023 - DNA, 15 bp, Homo sapiens
aattttattggtaat

SEQ ID NO: 174024 - DNA, 15 bp, Homo sapiens
attttattggtaatt

SEQ ID NO: 174025 - DNA, 15 bp, Homo sapiens
ttttattggtaattt

SEQ ID NO: 174026 - DNA, 15 bp, Homo sapiens
tttattggtaattta

SEQ ID NO: 174027 - DNA, 15 bp, Homo sapiens
ttattggtaatttat

SEQ ID NO: 174028 - DNA, 15 bp, Homo sapiens
tattggtaatttatg

SEQ ID NO: 174029 - DNA, 15 bp, Homo sapiens
attggtaatttatgt

SEQ ID NO: 174030 - DNA, 15 bp, Homo sapiens
ttggtaatttatgtg

SEQ ID NO: 174031 - DNA, 15 bp, Homo sapiens
tggtaatttatgtgt

SEQ ID NO: 174032 - DNA, 15 bp, Homo sapiens
ggtaatttatgtgta

SEQ ID NO: 174033 - DNA, 15 bp, Homo sapiens
gtaatttatgtgtag

SEQ ID NO: 174034 - DNA, 15 bp, Homo sapiens
taatttatgtgtagt

SEQ ID NO: 174035 - DNA, 15 bp, Homo sapiens
aatttatgtgtagtt

SEQ ID NO: 174036 - DNA, 15 bp, Homo sapiens
atttatgtgtagtta

SEQ ID NO: 174037 - DNA, 15 bp, Homo sapiens
tttatgtgtagttaa

SEQ ID NO: 174038 - DNA, 15 bp, Homo sapiens
ttatgtgtagttaac

SEQ ID NO: 174039 - DNA, 15 bp, Homo sapiens
tatgtgtagttaacc

SEQ ID NO: 174040 - DNA, 15 bp, Homo sapiens
atgtgtagttaacca

SEQ ID NO: 174041 - DNA, 15 bp, Homo sapiens
tgtgtagttaaccac

SEQ ID NO: 174042 - DNA, 15 bp, Homo sapiens
gtgtagttaaccaca

SEQ ID NO: 174043 - DNA, 15 bp, Homo sapiens
tgtagttaaccacat

SEQ ID NO: 174044 - DNA, 15 bp, Homo sapiens
gtagttaaccacata

SEQ ID NO: 174045 - DNA, 15 bp, Homo sapiens
tagttaaccacatac

SEQ ID NO: 174046 - DNA, 15 bp, Homo sapiens
agttaaccacatact

SEQ ID NO: 174047 - DNA, 15 bp, Homo sapiens
gttaaccacatactt

SEQ ID NO: 174048 - DNA, 15 bp, Homo sapiens
ttaaccacatacttg

SEQ ID NO: 174049 - DNA, 15 bp, Homo sapiens
taaccacatacttgt

SEQ ID NO: 174050 - DNA, 15 bp, Homo sapiens
aaccacatacttgtg

SEQ ID NO: 174051 - DNA, 15 bp, Homo sapiens
accacatacttgtgc

SEQ ID NO: 174052 - DNA, 15 bp, Homo sapiens
ccacatacttgtgcc

SEQ ID NO: 174053 - DNA, 15 bp, Homo sapiens
cacatacttgtgcct

SEQ ID NO: 174054 - DNA, 15 bp, Homo sapiens
acatacttgtgcctc

SEQ ID NO: 174055 - DNA, 15 bp, Homo sapiens
catacttgtgcctca

SEQ ID NO: 174056 - DNA, 15 bp, Homo sapiens
atacttgtgcctcaa

SEQ ID NO: 174057 - DNA, 15 bp, Homo sapiens
tacttgtgcctcaac

SEQ ID NO: 174058 - DNA, 15 bp, Homo sapiens
acttgtgcctcaact

SEQ ID NO: 174059 - DNA, 15 bp, Homo sapiens
cttgtgcctcaacta

SEQ ID NO: 174060 - DNA, 15 bp, Homo sapiens
ttgtgcctcaactat

SEQ ID NO: 174061 - DNA, 15 bp, Homo sapiens
tgtgcctcaactatt

SEQ ID NO: 174062 - DNA, 15 bp, Homo sapiens
gtgcctcaactattt

SEQ ID NO: 174063 - DNA, 15 bp, Homo sapiens
tgcctcaactatttc

SEQ ID NO: 174064 - DNA, 15 bp, Homo sapiens
gcctcaactatttca

SEQ ID NO: 174065 - DNA, 15 bp, Homo sapiens
cctcaactatttcac

SEQ ID NO: 174066 - DNA, 15 bp, Homo sapiens
ctcaactatttcaca

SEQ ID NO: 174067 - DNA, 15 bp, Homo sapiens
tcaactatttcacat

SEQ ID NO: 174068 - DNA, 15 bp, Homo sapiens
caactatttcacata

SEQ ID NO: 174069 - DNA, 15 bp, Homo sapiens
aactatttcacataa

SEQ ID NO: 174070 - DNA, 15 bp, Homo sapiens
actatttcacataaa

SEQ ID NO: 174071 - DNA, 15 bp, Homo sapiens
ctatttcacataaat

SEQ ID NO: 174072 - DNA, 15 bp, Homo sapiens
tatttcacataaatg

SEQ ID NO: 174073 - DNA, 15 bp, Homo sapiens
atttcacataaatgt

SEQ ID NO: 174074 - DNA, 15 bp, Homo sapiens
tttcacataaatgtg

SEQ ID NO: 174075 - DNA, 15 bp, Homo sapiens
ttcacataaatgtga

SEQ ID NO: 174076 - DNA, 15 bp, Homo sapiens
tcacataaatgtgag

SEQ ID NO: 174077 - DNA, 15 bp, Homo sapiens
cacataaatgtgaga

SEQ ID NO: 174078 - DNA, 15 bp, Homo sapiens
acataaatgtgagat

SEQ ID NO: 174079 - DNA, 15 bp, Homo sapiens
cataaatgtgagatg

SEQ ID NO: 174080 - DNA, 15 bp, Homo sapiens
ataaatgtgagatgt

SEQ ID NO: 174081 - DNA, 15 bp, Homo sapiens
taaatgtgagatgtc

SEQ ID NO: 174082 - DNA, 15 bp, Homo sapiens
aaatgtgagatgtct

SEQ ID NO: 174083 - DNA, 15 bp, Homo sapiens
aatgtgagatgtctt

SEQ ID NO: 174084 - DNA, 15 bp, Homo sapiens
atgtgagatgtctta

SEQ ID NO: 174085 - DNA, 15 bp, Homo sapiens
tgtgagatgtcttag

SEQ ID NO: 174086 - DNA, 15 bp, Homo sapiens
gtgagatgtcttagg

SEQ ID NO: 174087 - DNA, 15 bp, Homo sapiens
tgagatgtcttaggc

SEQ ID NO: 174088 - DNA, 15 bp, Homo sapiens
gagatgtcttaggcc

SEQ ID NO: 174089 - DNA, 15 bp, Homo sapiens
agatgtcttaggcct

SEQ ID NO: 174090 - DNA, 15 bp, Homo sapiens
gatgtcttaggcctc

SEQ ID NO: 174091 - DNA, 15 bp, Homo sapiens
atgtcttaggcctct

SEQ ID NO: 174092 - DNA, 15 bp, Homo sapiens
tgtcttaggcctctt

SEQ ID NO: 174093 - DNA, 15 bp, Homo sapiens
gtcttaggcctcttt

SEQ ID NO: 174094 - DNA, 15 bp, Homo sapiens
tcttaggcctctttg

SEQ ID NO: 174095 - DNA, 15 bp, Homo sapiens
cttaggcctctttga

SEQ ID NO: 174096 - DNA, 15 bp, Homo sapiens
ttaggcctctttgaa

SEQ ID NO: 174097 - DNA, 15 bp, Homo sapiens
taggcctctttgaac

SEQ ID NO: 174098 - DNA, 15 bp, Homo sapiens
aggcctctttgaact

SEQ ID NO: 174099 - DNA, 15 bp, Homo sapiens
ggcctctttgaactc

SEQ ID NO: 174100 - DNA, 15 bp, Homo sapiens
gcctctttgaactct

SEQ ID NO: 174101 - DNA, 15 bp, Homo sapiens
cctctttgaactctg

SEQ ID NO: 174102 - DNA, 15 bp, Homo sapiens
ctctttgaactctgc

SEQ ID NO: 174103 - DNA, 15 bp, Homo sapiens
tctttgaactctgca

SEQ ID NO: 174104 - DNA, 15 bp, Homo sapiens
ctttgaactctgcat

SEQ ID NO: 174105 - DNA, 15 bp, Homo sapiens
tttgaactctgcatg

SEQ ID NO: 174106 - DNA, 15 bp, Homo sapiens
ttgaactctgcatgg

SEQ ID NO: 174107 - DNA, 15 bp, Homo sapiens
tgaactctgcatgga

SEQ ID NO: 174108 - DNA, 15 bp, Homo sapiens
gaactctgcatggaa

SEQ ID NO: 174109 - DNA, 15 bp, Homo sapiens
aactctgcatggaaa

SEQ ID NO: 174110 - DNA, 15 bp, Homo sapiens
actctgcatggaaaa

SEQ ID NO: 174111 - DNA, 15 bp, Homo sapiens
ctctgcatggaaaag

SEQ ID NO: 174112 - DNA, 15 bp, Homo sapiens
tctgcatggaaaaga

SEQ ID NO: 174113 - DNA, 15 bp, Homo sapiens
ctgcatggaaaagaa

SEQ ID NO: 174114 - DNA, 15 bp, Homo sapiens
tgcatggaaaagaat

SEQ ID NO: 174115 - DNA, 15 bp, Homo sapiens
gcatggaaaagaatg

SEQ ID NO: 174116 - DNA, 15 bp, Homo sapiens
catggaaaagaatgc

SEQ ID NO: 174117 - DNA, 15 bp, Homo sapiens
atggaaaagaatgct

SEQ ID NO: 174118 - DNA, 15 bp, Homo sapiens
tggaaaagaatgctg

SEQ ID NO: 174119 - DNA, 15 bp, Homo sapiens
ggaaaagaatgctga

SEQ ID NO: 174120 - DNA, 15 bp, Homo sapiens
gaaaagaatgctgag

SEQ ID NO: 174121 - DNA, 15 bp, Homo sapiens
aaaagaatgctgagg

SEQ ID NO: 174122 - DNA, 15 bp, Homo sapiens
aaagaatgctgagga

SEQ ID NO: 174123 - DNA, 15 bp, Homo sapiens
aagaatgctgaggag

SEQ ID NO: 174124 - DNA, 15 bp, Homo sapiens
agaatgctgaggagg

SEQ ID NO: 174125 - DNA, 15 bp, Homo sapiens
gaatgctgaggaggt

SEQ ID NO: 174126 - DNA, 15 bp, Homo sapiens
aatgctgaggaggta

SEQ ID NO: 174127 - DNA, 15 bp, Homo sapiens
atgctgaggaggtat

SEQ ID NO: 174128 - DNA, 15 bp, Homo sapiens
tgctgaggaggtatg

SEQ ID NO: 174129 - DNA, 15 bp, Homo sapiens
gctgaggaggtatgt

SEQ ID NO: 174130 - DNA, 15 bp, Homo sapiens
ctgaggaggtatgtc

SEQ ID NO: 174131 - DNA, 15 bp, Homo sapiens
tgaggaggtatgtct

SEQ ID NO: 174132 - DNA, 15 bp, Homo sapiens
gaggaggtatgtctg

SEQ ID NO: 174133 - DNA, 15 bp, Homo sapiens
aggaggtatgtctgt

SEQ ID NO: 174134 - DNA, 15 bp, Homo sapiens
ggaggtatgtctgtt

SEQ ID NO: 174135 - DNA, 15 bp, Homo sapiens
gaggtatgtctgttt

SEQ ID NO: 174136 - DNA, 15 bp, Homo sapiens
aggtatgtctgttta

SEQ ID NO: 174137 - DNA, 15 bp, Homo sapiens
ggtatgtctgtttaa

SEQ ID NO: 174138 - DNA, 15 bp, Homo sapiens
gtatgtctgtttaag

SEQ ID NO: 174139 - DNA, 15 bp, Homo sapiens
tatgtctgtttaagc

SEQ ID NO: 174140 - DNA, 15 bp, Homo sapiens
atgtctgtttaagct

SEQ ID NO: 174141 - DNA, 15 bp, Homo sapiens
tgtctgtttaagctg

SEQ ID NO: 174142 - DNA, 15 bp, Homo sapiens
gtctgtttaagctgc

SEQ ID NO: 174143 - DNA, 15 bp, Homo sapiens
tctgtttaagctgcc

SEQ ID NO: 174144 - DNA, 15 bp, Homo sapiens
ctgtttaagctgcca

SEQ ID NO: 174145 - DNA, 15 bp, Homo sapiens
tgtttaagctgccac

SEQ ID NO: 174146 - DNA, 15 bp, Homo sapiens
gtttaagctgccact

SEQ ID NO: 174147 - DNA, 15 bp, Homo sapiens
tttaagctgccactg

SEQ ID NO: 174148 - DNA, 15 bp, Homo sapiens
ttaagctgccactgc

SEQ ID NO: 174149 - DNA, 15 bp, Homo sapiens
taagctgccactgcc

SEQ ID NO: 174150 - DNA, 15 bp, Homo sapiens
aagctgccactgcct

SEQ ID NO: 174151 - DNA, 15 bp, Homo sapiens
agctgccactgcctg

SEQ ID NO: 174152 - DNA, 15 bp, Homo sapiens
gctgccactgcctgc

SEQ ID NO: 174153 - DNA, 15 bp, Homo sapiens
ctgccactgcctgcc

SEQ ID NO: 174154 - DNA, 15 bp, Homo sapiens
tgccactgcctgcct

SEQ ID NO: 174155 - DNA, 15 bp, Homo sapiens
gccactgcctgcctc

SEQ ID NO: 174156 - DNA, 15 bp, Homo sapiens
ccactgcctgcctct

SEQ ID NO: 174157 - DNA, 15 bp, Homo sapiens
cactgcctgcctctc

SEQ ID NO: 174158 - DNA, 15 bp, Homo sapiens
actgcctgcctctca

SEQ ID NO: 174159 - DNA, 15 bp, Homo sapiens
ctgcctgcctctcat

SEQ ID NO: 174160 - DNA, 15 bp, Homo sapiens
tgcctgcctctcata

SEQ ID NO: 174161 - DNA, 15 bp, Homo sapiens
gcctgcctctcataa

SEQ ID NO: 174162 - DNA, 15 bp, Homo sapiens
cctgcctctcataaa

SEQ ID NO: 174163 - DNA, 15 bp, Homo sapiens
ctgcctctcataaat

SEQ ID NO: 174164 - DNA, 15 bp, Homo sapiens
tgcctctcataaata

SEQ ID NO: 174165 - DNA, 15 bp, Homo sapiens
gcctctcataaataa

SEQ ID NO: 174166 - DNA, 15 bp, Homo sapiens
cctctcataaataat

SEQ ID NO: 174167 - DNA, 15 bp, Homo sapiens
ctctcataaataata

SEQ ID NO: 174168 - DNA, 15 bp, Homo sapiens
tctcataaataatat

SEQ ID NO: 174169 - DNA, 15 bp, Homo sapiens
ctcataaataatatc

SEQ ID NO: 174170 - DNA, 15 bp, Homo sapiens
tcataaataatatct

SEQ ID NO: 174171 - DNA, 15 bp, Homo sapiens
cataaataatatctc

SEQ ID NO: 174172 - DNA, 15 bp, Homo sapiens
ataaataatatctca

SEQ ID NO: 174173 - DNA, 15 bp, Homo sapiens
taaataatatctcac

SEQ ID NO: 174174 - DNA, 15 bp, Homo sapiens
aaataatatctcaca

SEQ ID NO: 174175 - DNA, 15 bp, Homo sapiens
aataatatctcacat

SEQ ID NO: 174176 - DNA, 15 bp, Homo sapiens
ataatatctcacatt

SEQ ID NO: 174177 - DNA, 15 bp, Homo sapiens
taatatctcacattg

SEQ ID NO: 174178 - DNA, 15 bp, Homo sapiens
aatatctcacattgc

SEQ ID NO: 174179 - DNA, 15 bp, Homo sapiens
atatctcacattgca

SEQ ID NO: 174180 - DNA, 15 bp, Homo sapiens
tatctcacattgcat

SEQ ID NO: 174181 - DNA, 15 bp, Homo sapiens
atctcacattgcata

SEQ ID NO: 174182 - DNA, 15 bp, Homo sapiens
tctcacattgcataa

SEQ ID NO: 174183 - DNA, 15 bp, Homo sapiens
ctcacattgcataat

SEQ ID NO: 174184 - DNA, 15 bp, Homo sapiens
tcacattgcataata

SEQ ID NO: 174185 - DNA, 15 bp, Homo sapiens
cacattgcataatag

SEQ ID NO: 174186 - DNA, 15 bp, Homo sapiens
acattgcataatagc

SEQ ID NO: 174187 - DNA, 15 bp, Homo sapiens
cattgcataatagcc

SEQ ID NO: 174188 - DNA, 15 bp, Homo sapiens
attgcataatagccc

SEQ ID NO: 174189 - DNA, 15 bp, Homo sapiens
ttgcataatagccca

SEQ ID NO: 174190 - DNA, 15 bp, Homo sapiens
tgcataatagcccag

SEQ ID NO: 174191 - DNA, 15 bp, Homo sapiens
gcataatagcccaga

SEQ ID NO: 174192 - DNA, 15 bp, Homo sapiens
cataatagcccagat

SEQ ID NO: 174193 - DNA, 15 bp, Homo sapiens
ataatagcccagata

SEQ ID NO: 174194 - DNA, 15 bp, Homo sapiens
taatagcccagataa

SEQ ID NO: 174195 - DNA, 15 bp, Homo sapiens
aatagcccagataaa

SEQ ID NO: 174196 - DNA, 15 bp, Homo sapiens
atagcccagataaac

SEQ ID NO: 174197 - DNA, 15 bp, Homo sapiens
tagcccagataaact

SEQ ID NO: 174198 - DNA, 15 bp, Homo sapiens
agcccagataaactg

SEQ ID NO: 174199 - DNA, 15 bp, Homo sapiens
gcccagataaactgc

SEQ ID NO: 174200 - DNA, 15 bp, Homo sapiens
cccagataaactgca

SEQ ID NO: 174201 - DNA, 15 bp, Homo sapiens
ccagataaactgcag

SEQ ID NO: 174202 - DNA, 15 bp, Homo sapiens
cagataaactgcaga

SEQ ID NO: 174203 - DNA, 15 bp, Homo sapiens
agataaactgcagat

SEQ ID NO: 174204 - DNA, 15 bp, Homo sapiens
gataaactgcagatc

SEQ ID NO: 174205 - DNA, 15 bp, Homo sapiens
ataaactgcagatcg

SEQ ID NO: 174206 - DNA, 15 bp, Homo sapiens
taaactgcagatcgc

SEQ ID NO: 174207 - DNA, 15 bp, Homo sapiens
aaactgcagatcgct

SEQ ID NO: 174208 - DNA, 15 bp, Homo sapiens
aactgcagatcgctt

SEQ ID NO: 174209 - DNA, 15 bp, Homo sapiens
actgcagatcgctta

SEQ ID NO: 174210 - DNA, 15 bp, Homo sapiens
ctgcagatcgcttag

SEQ ID NO: 174211 - DNA, 15 bp, Homo sapiens
tgcagatcgcttaga

SEQ ID NO: 174212 - DNA, 15 bp, Homo sapiens
gcagatcgcttagag

SEQ ID NO: 174213 - DNA, 15 bp, Homo sapiens
cagatcgcttagagc

SEQ ID NO: 174214 - DNA, 15 bp, Homo sapiens
agatcgcttagagcc

SEQ ID NO: 174215 - DNA, 15 bp, Homo sapiens
gatcgcttagagcct

SEQ ID NO: 174216 - DNA, 15 bp, Homo sapiens
atcgcttagagcctg

SEQ ID NO: 174217 - DNA, 15 bp, Homo sapiens
tcgcttagagcctga

SEQ ID NO: 174218 - DNA, 15 bp, Homo sapiens
cgcttagagcctgat

SEQ ID NO: 174219 - DNA, 15 bp, Homo sapiens
gcttagagcctgata

SEQ ID NO: 174220 - DNA, 15 bp, Homo sapiens
cttagagcctgataa

SEQ ID NO: 174221 - DNA, 15 bp, Homo sapiens
ttagagcctgataaa

SEQ ID NO: 174222 - DNA, 15 bp, Homo sapiens
tagagcctgataaat

SEQ ID NO: 174223 - DNA, 15 bp, Homo sapiens
agagcctgataaatg

SEQ ID NO: 174224 - DNA, 15 bp, Homo sapiens
gagcctgataaatga

SEQ ID NO: 174225 - DNA, 15 bp, Homo sapiens
agcctgataaatgag

SEQ ID NO: 174226 - DNA, 15 bp, Homo sapiens
gcctgataaatgaga

SEQ ID NO: 174227 - DNA, 15 bp, Homo sapiens
cctgataaatgagag

SEQ ID NO: 174228 - DNA, 15 bp, Homo sapiens
ctgataaatgagagg

SEQ ID NO: 174229 - DNA, 15 bp, Homo sapiens
tgataaatgagagga

SEQ ID NO: 174230 - DNA, 15 bp, Homo sapiens
gataaatgagaggaa

SEQ ID NO: 174231 - DNA, 15 bp, Homo sapiens
ataaatgagaggaaa

SEQ ID NO: 174232 - DNA, 15 bp, Homo sapiens
taaatgagaggaaac

SEQ ID NO: 174233 - DNA, 15 bp, Homo sapiens
aaatgagaggaaact

SEQ ID NO: 174234 - DNA, 15 bp, Homo sapiens
aatgagaggaaactg

SEQ ID NO: 174235 - DNA, 15 bp, Homo sapiens
atgagaggaaactgt

SEQ ID NO: 174236 - DNA, 15 bp, Homo sapiens
tgagaggaaactgta

SEQ ID NO: 174237 - DNA, 15 bp, Homo sapiens
gagaggaaactgtac

SEQ ID NO: 174238 - DNA, 15 bp, Homo sapiens
agaggaaactgtaca

SEQ ID NO: 174239 - DNA, 15 bp, Homo sapiens
gaggaaactgtacag

SEQ ID NO: 174240 - DNA, 15 bp, Homo sapiens
aggaaactgtacagt

SEQ ID NO: 174241 - DNA, 15 bp, Homo sapiens
ggaaactgtacagtt

SEQ ID NO: 174242 - DNA, 15 bp, Homo sapiens
gaaactgtacagttt

SEQ ID NO: 174243 - DNA, 15 bp, Homo sapiens
aaactgtacagtttg

SEQ ID NO: 174244 - DNA, 15 bp, Homo sapiens
aactgtacagtttgt

SEQ ID NO: 174245 - DNA, 15 bp, Homo sapiens
actgtacagtttgtt

SEQ ID NO: 174246 - DNA, 15 bp, Homo sapiens
ctgtacagtttgttt

SEQ ID NO: 174247 - DNA, 15 bp, Homo sapiens
tgtacagtttgtttt

SEQ ID NO: 174248 - DNA, 15 bp, Homo sapiens
gtacagtttgttttc

SEQ ID NO: 174249 - DNA, 15 bp, Homo sapiens
tacagtttgttttcc

SEQ ID NO: 174250 - DNA, 15 bp, Homo sapiens
acagtttgttttcca

SEQ ID NO: 174251 - DNA, 15 bp, Homo sapiens
cagtttgttttccaa

SEQ ID NO: 174252 - DNA, 15 bp, Homo sapiens
agtttgttttccaaa

SEQ ID NO: 174253 - DNA, 15 bp, Homo sapiens
gtttgttttccaaat

SEQ ID NO: 174254 - DNA, 15 bp, Homo sapiens
tttgttttccaaatt

SEQ ID NO: 174255 - DNA, 15 bp, Homo sapiens
ttgttttccaaattg

SEQ ID NO: 174256 - DNA, 15 bp, Homo sapiens
tgttttccaaattgc

SEQ ID NO: 174257 - DNA, 15 bp, Homo sapiens
gttttccaaattgcc

SEQ ID NO: 174258 - DNA, 15 bp, Homo sapiens
ttttccaaattgccc

SEQ ID NO: 174259 - DNA, 15 bp, Homo sapiens
tttccaaattgccct

SEQ ID NO: 174260 - DNA, 15 bp, Homo sapiens
ttccaaattgccctt

SEQ ID NO: 174261 - DNA, 15 bp, Homo sapiens
tccaaattgcccttg

SEQ ID NO: 174262 - DNA, 15 bp, Homo sapiens
ccaaattgcccttgg

SEQ ID NO: 174263 - DNA, 15 bp, Homo sapiens
caaattgcccttgga

SEQ ID NO: 174264 - DNA, 15 bp, Homo sapiens
aaattgcccttggac

SEQ ID NO: 174265 - DNA, 15 bp, Homo sapiens
aattgcccttggaca

SEQ ID NO: 174266 - DNA, 15 bp, Homo sapiens
attgcccttggacag

SEQ ID NO: 174267 - DNA, 15 bp, Homo sapiens
ttgcccttggacagc

SEQ ID NO: 174268 - DNA, 15 bp, Homo sapiens
tgcccttggacagct

SEQ ID NO: 174269 - DNA, 15 bp, Homo sapiens
gcccttggacagcta

SEQ ID NO: 174270 - DNA, 15 bp, Homo sapiens
cccttggacagctaa

SEQ ID NO: 174271 - DNA, 15 bp, Homo sapiens
ccttggacagctaat

SEQ ID NO: 174272 - DNA, 15 bp, Homo sapiens
cttggacagctaatt

SEQ ID NO: 174273 - DNA, 15 bp, Homo sapiens
ttggacagctaattc

SEQ ID NO: 174274 - DNA, 15 bp, Homo sapiens
tggacagctaattca

SEQ ID NO: 174275 - DNA, 15 bp, Homo sapiens
ggacagctaattcac

SEQ ID NO: 174276 - DNA, 15 bp, Homo sapiens
gacagctaattcaca

SEQ ID NO: 174277 - DNA, 15 bp, Homo sapiens
acagctaattcacaa

SEQ ID NO: 174278 - DNA, 15 bp, Homo sapiens
cagctaattcacaat

SEQ ID NO: 174279 - DNA, 15 bp, Homo sapiens
agctaattcacaatt

SEQ ID NO: 174280 - DNA, 15 bp, Homo sapiens
gctaattcacaattt

SEQ ID NO: 174281 - DNA, 15 bp, Homo sapiens
ctaattcacaattta

SEQ ID NO: 174282 - DNA, 15 bp, Homo sapiens
taattcacaatttac

SEQ ID NO: 174283 - DNA, 15 bp, Homo sapiens
aattcacaatttact

SEQ ID NO: 174284 - DNA, 15 bp, Homo sapiens
attcacaatttacta

SEQ ID NO: 174285 - DNA, 15 bp, Homo sapiens
ttcacaatttactat

SEQ ID NO: 174286 - DNA, 15 bp, Homo sapiens
tcacaatttactatt

SEQ ID NO: 174287 - DNA, 15 bp, Homo sapiens
cacaatttactattt

SEQ ID NO: 174288 - DNA, 15 bp, Homo sapiens
acaatttactatttt

SEQ ID NO: 174289 - DNA, 15 bp, Homo sapiens
caatttactatttta

SEQ ID NO: 174290 - DNA, 15 bp, Homo sapiens
aatttactattttat

SEQ ID NO: 174291 - DNA, 15 bp, Homo sapiens
atttactattttata

SEQ ID NO: 174292 - DNA, 15 bp, Homo sapiens
tttactattttatag

SEQ ID NO: 174293 - DNA, 15 bp, Homo sapiens
ttactattttatagc

SEQ ID NO: 174294 - DNA, 15 bp, Homo sapiens
tactattttatagct

SEQ ID NO: 174295 - DNA, 15 bp, Homo sapiens
actattttatagctg

SEQ ID NO: 174296 - DNA, 15 bp, Homo sapiens
ctattttatagctgt

SEQ ID NO: 174297 - DNA, 15 bp, Homo sapiens
tattttatagctgta

SEQ ID NO: 174298 - DNA, 15 bp, Homo sapiens
attttatagctgtaa

SEQ ID NO: 174299 - DNA, 15 bp, Homo sapiens
ttttatagctgtaag

SEQ ID NO: 174300 - DNA, 15 bp, Homo sapiens
tttatagctgtaaga

SEQ ID NO: 174301 - DNA, 15 bp, Homo sapiens
ttatagctgtaagat

SEQ ID NO: 174302 - DNA, 15 bp, Homo sapiens
tatagctgtaagatt

SEQ ID NO: 174303 - DNA, 15 bp, Homo sapiens
atagctgtaagattt

SEQ ID NO: 174304 - DNA, 15 bp, Homo sapiens
tagctgtaagatttt

SEQ ID NO: 174305 - DNA, 15 bp, Homo sapiens
agctgtaagatttta

SEQ ID NO: 174306 - DNA, 15 bp, Homo sapiens
gctgtaagattttaa

SEQ ID NO: 174307 - DNA, 15 bp, Homo sapiens
ctgtaagattttaaa

SEQ ID NO: 174308 - DNA, 15 bp, Homo sapiens
tgtaagattttaaaa

SEQ ID NO: 174309 - DNA, 15 bp, Homo sapiens
gtaagattttaaaaa

SEQ ID NO: 174310 - DNA, 15 bp, Homo sapiens
taagattttaaaaat

SEQ ID NO: 174311 - DNA, 15 bp, Homo sapiens
aagattttaaaaata

SEQ ID NO: 174312 - DNA, 15 bp, Homo sapiens
agattttaaaaatat

SEQ ID NO: 174313 - DNA, 15 bp, Homo sapiens
gattttaaaaatata

SEQ ID NO: 174314 - DNA, 15 bp, Homo sapiens
attttaaaaatataa

SEQ ID NO: 174315 - DNA, 15 bp, Homo sapiens
ttttaaaaatataaa

SEQ ID NO: 174316 - DNA, 15 bp, Homo sapiens
tttaaaaatataaaa

SEQ ID NO: 174317 - DNA, 15 bp, Homo sapiens
ttaaaaatataaaat

SEQ ID NO: 174318 - DNA, 15 bp, Homo sapiens
taaaaatataaaata

SEQ ID NO: 174319 - DNA, 15 bp, Homo sapiens
aaaaatataaaataa

SEQ ID NO: 174320 - DNA, 15 bp, Homo sapiens
aaaatataaaataac

SEQ ID NO: 174321 - DNA, 15 bp, Homo sapiens
aaatataaaataaca

SEQ ID NO: 174322 - DNA, 15 bp, Homo sapiens
aatataaaataacat

SEQ ID NO: 174323 - DNA, 15 bp, Homo sapiens
atataaaataacata

SEQ ID NO: 174324 - DNA, 15 bp, Homo sapiens
tataaaataacatag

SEQ ID NO: 174325 - DNA, 15 bp, Homo sapiens
ataaaataacatagc

SEQ ID NO: 174326 - DNA, 15 bp, Homo sapiens
taaaataacatagct

SEQ ID NO: 174327 - DNA, 15 bp, Homo sapiens
aaaataacatagctg

SEQ ID NO: 174328 - DNA, 15 bp, Homo sapiens
aaataacatagctgt

SEQ ID NO: 174329 - DNA, 15 bp, Homo sapiens
aataacatagctgta

SEQ ID NO: 174330 - DNA, 15 bp, Homo sapiens
ataacatagctgtaa

SEQ ID NO: 174331 - DNA, 15 bp, Homo sapiens
taacatagctgtaaa

SEQ ID NO: 174332 - DNA, 15 bp, Homo sapiens
aacatagctgtaaat

SEQ ID NO: 174333 - DNA, 15 bp, Homo sapiens
acatagctgtaaata

SEQ ID NO: 174334 - DNA, 15 bp, Homo sapiens
catagctgtaaatac

SEQ ID NO: 174335 - DNA, 15 bp, Homo sapiens
atagctgtaaataca

SEQ ID NO: 174336 - DNA, 15 bp, Homo sapiens
tagctgtaaatacag

SEQ ID NO: 174337 - DNA, 15 bp, Homo sapiens
agctgtaaatacaga

SEQ ID NO: 174338 - DNA, 15 bp, Homo sapiens
gctgtaaatacagat

SEQ ID NO: 174339 - DNA, 15 bp, Homo sapiens
ctgtaaatacagatt

SEQ ID NO: 174340 - DNA, 15 bp, Homo sapiens
tgtaaatacagatta

SEQ ID NO: 174341 - DNA, 15 bp, Homo sapiens
gtaaatacagattat

SEQ ID NO: 174342 - DNA, 15 bp, Homo sapiens
taaatacagattatc

SEQ ID NO: 174343 - DNA, 15 bp, Homo sapiens
aaatacagattatca

SEQ ID NO: 174344 - DNA, 15 bp, Homo sapiens
aatacagattatcag

SEQ ID NO: 174345 - DNA, 15 bp, Homo sapiens
atacagattatcaga

SEQ ID NO: 174346 - DNA, 15 bp, Homo sapiens
tacagattatcagaa

SEQ ID NO: 174347 - DNA, 15 bp, Homo sapiens
acagattatcagaag

SEQ ID NO: 174348 - DNA, 15 bp, Homo sapiens
cagattatcagaaga

SEQ ID NO: 174349 - DNA, 15 bp, Homo sapiens
agattatcagaagat

SEQ ID NO: 174350 - DNA, 15 bp, Homo sapiens
gattatcagaagata

SEQ ID NO: 174351 - DNA, 15 bp, Homo sapiens
attatcagaagatag

SEQ ID NO: 174352 - DNA, 15 bp, Homo sapiens
ttatcagaagatagt

SEQ ID NO: 174353 - DNA, 15 bp, Homo sapiens
tatcagaagatagtc

SEQ ID NO: 174354 - DNA, 15 bp, Homo sapiens
atcagaagatagtct

SEQ ID NO: 174355 - DNA, 15 bp, Homo sapiens
tcagaagatagtctg

SEQ ID NO: 174356 - DNA, 15 bp, Homo sapiens
cagaagatagtctgt

SEQ ID NO: 174357 - DNA, 15 bp, Homo sapiens
agaagatagtctgta

SEQ ID NO: 174358 - DNA, 15 bp, Homo sapiens
gaagatagtctgtaa

SEQ ID NO: 174359 - DNA, 15 bp, Homo sapiens
aagatagtctgtaaa

SEQ ID NO: 174360 - DNA, 15 bp, Homo sapiens
agatagtctgtaaaa

SEQ ID NO: 174361 - DNA, 15 bp, Homo sapiens
gatagtctgtaaaaa

SEQ ID NO: 174362 - DNA, 15 bp, Homo sapiens
atagtctgtaaaaat

SEQ ID NO: 174363 - DNA, 15 bp, Homo sapiens
tagtctgtaaaaatg

SEQ ID NO: 174364 - DNA, 15 bp, Homo sapiens
agtctgtaaaaatgt

SEQ ID NO: 174365 - DNA, 15 bp, Homo sapiens
gtctgtaaaaatgta

SEQ ID NO: 174366 - DNA, 15 bp, Homo sapiens
tctgtaaaaatgtaa

SEQ ID NO: 174367 - DNA, 15 bp, Homo sapiens
ctgtaaaaatgtaaa

SEQ ID NO: 174368 - DNA, 15 bp, Homo sapiens
tgtaaaaatgtaaat

SEQ ID NO: 174369 - DNA, 15 bp, Homo sapiens
gtaaaaatgtaaata

SEQ ID NO: 174370 - DNA, 15 bp, Homo sapiens
taaaaatgtaaatat

SEQ ID NO: 174371 - DNA, 15 bp, Homo sapiens
aaaaatgtaaatata

SEQ ID NO: 174372 - DNA, 15 bp, Homo sapiens
aaaatgtaaatataa

SEQ ID NO: 174373 - DNA, 15 bp, Homo sapiens
aaatgtaaatataat

SEQ ID NO: 174374 - DNA, 15 bp, Homo sapiens
aatgtaaatataata

SEQ ID NO: 174375 - DNA, 15 bp, Homo sapiens
atgtaaatataatat

SEQ ID NO: 174376 - DNA, 15 bp, Homo sapiens
tgtaaatataatata

SEQ ID NO: 174377 - DNA, 15 bp, Homo sapiens
gtaaatataatatag

SEQ ID NO: 174378 - DNA, 15 bp, Homo sapiens
taaatataatatagc

SEQ ID NO: 174379 - DNA, 15 bp, Homo sapiens
aaatataatatagct

SEQ ID NO: 174380 - DNA, 15 bp, Homo sapiens
aatataatatagctg

SEQ ID NO: 174381 - DNA, 15 bp, Homo sapiens
atataatatagctgt

SEQ ID NO: 174382 - DNA, 15 bp, Homo sapiens
tataatatagctgta

SEQ ID NO: 174383 - DNA, 15 bp, Homo sapiens
ataatatagctgtaa

SEQ ID NO: 174384 - DNA, 15 bp, Homo sapiens
taatatagctgtaaa

SEQ ID NO: 174385 - DNA, 15 bp, Homo sapiens
aatatagctgtaaat

SEQ ID NO: 174386 - DNA, 15 bp, Homo sapiens
atatagctgtaaata

SEQ ID NO: 174387 - DNA, 15 bp, Homo sapiens
tatagctgtaaatat

SEQ ID NO: 174388 - DNA, 15 bp, Homo sapiens
atagctgtaaatata

SEQ ID NO: 174389 - DNA, 15 bp, Homo sapiens
tagctgtaaatatac

SEQ ID NO: 174390 - DNA, 15 bp, Homo sapiens
agctgtaaatataca

SEQ ID NO: 174391 - DNA, 15 bp, Homo sapiens
gctgtaaatatacac

SEQ ID NO: 174392 - DNA, 15 bp, Homo sapiens
ctgtaaatatacact

SEQ ID NO: 174393 - DNA, 15 bp, Homo sapiens
tgtaaatatacacta

SEQ ID NO: 174394 - DNA, 15 bp, Homo sapiens
gtaaatatacactat

SEQ ID NO: 174395 - DNA, 15 bp, Homo sapiens
taaatatacactatc

SEQ ID NO: 174396 - DNA, 15 bp, Homo sapiens
aaatatacactatcg

SEQ ID NO: 174397 - DNA, 15 bp, Homo sapiens
aatatacactatcgg

SEQ ID NO: 174398 - DNA, 15 bp, Homo sapiens
atatacactatcgga

SEQ ID NO: 174399 - DNA, 15 bp, Homo sapiens
tatacactatcggaa

SEQ ID NO: 174400 - DNA, 15 bp, Homo sapiens
atacactatcggaag

SEQ ID NO: 174401 - DNA, 15 bp, Homo sapiens
tacactatcggaagt

SEQ ID NO: 174402 - DNA, 15 bp, Homo sapiens
acactatcggaagta

SEQ ID NO: 174403 - DNA, 15 bp, Homo sapiens
cactatcggaagtac

SEQ ID NO: 174404 - DNA, 15 bp, Homo sapiens
actatcggaagtacc

SEQ ID NO: 174405 - DNA, 15 bp, Homo sapiens
ctatcggaagtacca

SEQ ID NO: 174406 - DNA, 15 bp, Homo sapiens
tatcggaagtaccaa

SEQ ID NO: 174407 - DNA, 15 bp, Homo sapiens
atcggaagtaccaaa

SEQ ID NO: 174408 - DNA, 15 bp, Homo sapiens
tcggaagtaccaaat

SEQ ID NO: 174409 - DNA, 15 bp, Homo sapiens
cggaagtaccaaatc

SEQ ID NO: 174410 - DNA, 15 bp, Homo sapiens
ggaagtaccaaatct

SEQ ID NO: 174411 - DNA, 15 bp, Homo sapiens
gaagtaccaaatcta

SEQ ID NO: 174412 - DNA, 15 bp, Homo sapiens
aagtaccaaatctag

SEQ ID NO: 174413 - DNA, 15 bp, Homo sapiens
agtaccaaatctagt

SEQ ID NO: 174414 - DNA, 15 bp, Homo sapiens
gtaccaaatctagtt

SEQ ID NO: 174415 - DNA, 15 bp, Homo sapiens
taccaaatctagttt

SEQ ID NO: 174416 - DNA, 15 bp, Homo sapiens
accaaatctagtttt

SEQ ID NO: 174417 - DNA, 15 bp, Homo sapiens
ccaaatctagtttta

SEQ ID NO: 174418 - DNA, 15 bp, Homo sapiens
caaatctagttttag

SEQ ID NO: 174419 - DNA, 15 bp, Homo sapiens
aaatctagttttagt

SEQ ID NO: 174420 - DNA, 15 bp, Homo sapiens
aatctagttttagta

SEQ ID NO: 174421 - DNA, 15 bp, Homo sapiens
atctagttttagtag

SEQ ID NO: 174422 - DNA, 15 bp, Homo sapiens
tctagttttagtagg

SEQ ID NO: 174423 - DNA, 15 bp, Homo sapiens
ctagttttagtaggt

SEQ ID NO: 174424 - DNA, 15 bp, Homo sapiens
tagttttagtaggta

SEQ ID NO: 174425 - DNA, 15 bp, Homo sapiens
agttttagtaggtag

SEQ ID NO: 174426 - DNA, 15 bp, Homo sapiens
gttttagtaggtaga

SEQ ID NO: 174427 - DNA, 15 bp, Homo sapiens
ttttagtaggtagag

SEQ ID NO: 174428 - DNA, 15 bp, Homo sapiens
tttagtaggtagagg

SEQ ID NO: 174429 - DNA, 15 bp, Homo sapiens
ttagtaggtagaggc

SEQ ID NO: 174430 - DNA, 15 bp, Homo sapiens
tagtaggtagaggca

SEQ ID NO: 174431 - DNA, 15 bp, Homo sapiens
agtaggtagaggcat

SEQ ID NO: 174432 - DNA, 15 bp, Homo sapiens
gtaggtagaggcatc

SEQ ID NO: 174433 - DNA, 15 bp, Homo sapiens
taggtagaggcatca

SEQ ID NO: 174434 - DNA, 15 bp, Homo sapiens
aggtagaggcatcaa

SEQ ID NO: 174435 - DNA, 15 bp, Homo sapiens
ggtagaggcatcaag

SEQ ID NO: 174436 - DNA, 15 bp, Homo sapiens
gtagaggcatcaagt

SEQ ID NO: 174437 - DNA, 15 bp, Homo sapiens
tagaggcatcaagta

SEQ ID NO: 174438 - DNA, 15 bp, Homo sapiens
agaggcatcaagtaa

SEQ ID NO: 174439 - DNA, 15 bp, Homo sapiens
gaggcatcaagtaaa

SEQ ID NO: 174440 - DNA, 15 bp, Homo sapiens
aggcatcaagtaaaa

SEQ ID NO: 174441 - DNA, 15 bp, Homo sapiens
ggcatcaagtaaaat

SEQ ID NO: 174442 - DNA, 15 bp, Homo sapiens
gcatcaagtaaaatg

SEQ ID NO: 174443 - DNA, 15 bp, Homo sapiens
catcaagtaaaatgg

SEQ ID NO: 174444 - DNA, 15 bp, Homo sapiens
atcaagtaaaatgga

SEQ ID NO: 174445 - DNA, 15 bp, Homo sapiens
tcaagtaaaatggaa

SEQ ID NO: 174446 - DNA, 15 bp, Homo sapiens
caagtaaaatggaaa

SEQ ID NO: 174447 - DNA, 15 bp, Homo sapiens
aagtaaaatggaaat

SEQ ID NO: 174448 - DNA, 15 bp, Homo sapiens
agtaaaatggaaatg

SEQ ID NO: 174449 - DNA, 15 bp, Homo sapiens
gtaaaatggaaatga

SEQ ID NO: 174450 - DNA, 15 bp, Homo sapiens
taaaatggaaatgaa

SEQ ID NO: 174451 - DNA, 15 bp, Homo sapiens
aaaatggaaatgaaa

SEQ ID NO: 174452 - DNA, 15 bp, Homo sapiens
aaatggaaatgaaag

SEQ ID NO: 174453 - DNA, 15 bp, Homo sapiens
aatggaaatgaaaga

SEQ ID NO: 174454 - DNA, 15 bp, Homo sapiens
atggaaatgaaagat

SEQ ID NO: 174455 - DNA, 15 bp, Homo sapiens
tggaaatgaaagatg

SEQ ID NO: 174456 - DNA, 15 bp, Homo sapiens
ggaaatgaaagatgt

SEQ ID NO: 174457 - DNA, 15 bp, Homo sapiens
gaaatgaaagatgtt

SEQ ID NO: 174458 - DNA, 15 bp, Homo sapiens
aaatgaaagatgttt

SEQ ID NO: 174459 - DNA, 15 bp, Homo sapiens
aatgaaagatgtttc

SEQ ID NO: 174460 - DNA, 15 bp, Homo sapiens
atgaaagatgtttca

SEQ ID NO: 174461 - DNA, 15 bp, Homo sapiens
tgaaagatgtttcaa

SEQ ID NO: 174462 - DNA, 15 bp, Homo sapiens
gaaagatgtttcaag

SEQ ID NO: 174463 - DNA, 15 bp, Homo sapiens
aaagatgtttcaagg

SEQ ID NO: 174464 - DNA, 15 bp, Homo sapiens
aagatgtttcaagga

SEQ ID NO: 174465 - DNA, 15 bp, Homo sapiens
agatgtttcaaggaa

SEQ ID NO: 174466 - DNA, 15 bp, Homo sapiens
gatgtttcaaggaaa

SEQ ID NO: 174467 - DNA, 15 bp, Homo sapiens
atgtttcaaggaaaa

SEQ ID NO: 174468 - DNA, 15 bp, Homo sapiens
tgtttcaaggaaaac

SEQ ID NO: 174469 - DNA, 15 bp, Homo sapiens
gtttcaaggaaaact

SEQ ID NO: 174470 - DNA, 15 bp, Homo sapiens
tttcaaggaaaactc

SEQ ID NO: 174471 - DNA, 15 bp, Homo sapiens
ttcaaggaaaactcc

SEQ ID NO: 174472 - DNA, 15 bp, Homo sapiens
tcaaggaaaactcca

SEQ ID NO: 174473 - DNA, 15 bp, Homo sapiens
caaggaaaactccag

SEQ ID NO: 174474 - DNA, 15 bp, Homo sapiens
aaggaaaactccagg

SEQ ID NO: 174475 - DNA, 15 bp, Homo sapiens
aggaaaactccagga

SEQ ID NO: 174476 - DNA, 15 bp, Homo sapiens
ggaaaactccaggac

SEQ ID NO: 174477 - DNA, 15 bp, Homo sapiens
gaaaactccaggaca

SEQ ID NO: 174478 - DNA, 15 bp, Homo sapiens
aaaactccaggacat

SEQ ID NO: 174479 - DNA, 15 bp, Homo sapiens
aaactccaggacatc

SEQ ID NO: 174480 - DNA, 15 bp, Homo sapiens
aactccaggacatct

SEQ ID NO: 174481 - DNA, 15 bp, Homo sapiens
actccaggacatctg

SEQ ID NO: 174482 - DNA, 15 bp, Homo sapiens
ctccaggacatctgt

SEQ ID NO: 174483 - DNA, 15 bp, Homo sapiens
tccaggacatctgtg

SEQ ID NO: 174484 - DNA, 15 bp, Homo sapiens
ccaggacatctgtgg

SEQ ID NO: 174485 - DNA, 15 bp, Homo sapiens
caggacatctgtggc

SEQ ID NO: 174486 - DNA, 15 bp, Homo sapiens
aggacatctgtggca

SEQ ID NO: 174487 - DNA, 15 bp, Homo sapiens
ggacatctgtggcag

SEQ ID NO: 174488 - DNA, 15 bp, Homo sapiens
gacatctgtggcagt

SEQ ID NO: 174489 - DNA, 15 bp, Homo sapiens
acatctgtggcagta

SEQ ID NO: 174490 - DNA, 15 bp, Homo sapiens
catctgtggcagtac

SEQ ID NO: 174491 - DNA, 15 bp, Homo sapiens
atctgtggcagtact

SEQ ID NO: 174492 - DNA, 15 bp, Homo sapiens
tctgtggcagtacta

SEQ ID NO: 174493 - DNA, 15 bp, Homo sapiens
ctgtggcagtactaa

SEQ ID NO: 174494 - DNA, 15 bp, Homo sapiens
tgtggcagtactaaa

SEQ ID NO: 174495 - DNA, 15 bp, Homo sapiens
gtggcagtactaaag

SEQ ID NO: 174496 - DNA, 15 bp, Homo sapiens
tggcagtactaaaga

SEQ ID NO: 174497 - DNA, 15 bp, Homo sapiens
ggcagtactaaagaa

SEQ ID NO: 174498 - DNA, 15 bp, Homo sapiens
gcagtactaaagaaa

SEQ ID NO: 174499 - DNA, 15 bp, Homo sapiens
cagtactaaagaaac

SEQ ID NO: 174500 - DNA, 15 bp, Homo sapiens
agtactaaagaaacc

SEQ ID NO: 174501 - DNA, 15 bp, Homo sapiens
gtactaaagaaacct

SEQ ID NO: 174502 - DNA, 15 bp, Homo sapiens
tactaaagaaacctt

SEQ ID NO: 174503 - DNA, 15 bp, Homo sapiens
actaaagaaaccttc

SEQ ID NO: 174504 - DNA, 15 bp, Homo sapiens
ctaaagaaaccttcc

SEQ ID NO: 174505 - DNA, 15 bp, Homo sapiens
taaagaaaccttcct

SEQ ID NO: 174506 - DNA, 15 bp, Homo sapiens
aaagaaaccttcctt

SEQ ID NO: 174507 - DNA, 15 bp, Homo sapiens
aagaaaccttccttc

SEQ ID NO: 174508 - DNA, 15 bp, Homo sapiens
agaaaccttccttct

SEQ ID NO: 174509 - DNA, 15 bp, Homo sapiens
gaaaccttccttctc

SEQ ID NO: 174510 - DNA, 15 bp, Homo sapiens
aaaccttccttctca

SEQ ID NO: 174511 - DNA, 15 bp, Homo sapiens
aaccttccttctcag

SEQ ID NO: 174512 - DNA, 15 bp, Homo sapiens
accttccttctcagg

SEQ ID NO: 174513 - DNA, 15 bp, Homo sapiens
ccttccttctcaggt

SEQ ID NO: 174514 - DNA, 15 bp, Homo sapiens
cttccttctcaggtt

SEQ ID NO: 174515 - DNA, 15 bp, Homo sapiens
ttccttctcaggttc

SEQ ID NO: 174516 - DNA, 15 bp, Homo sapiens
tccttctcaggttcc

SEQ ID NO: 174517 - DNA, 15 bp, Homo sapiens
ccttctcaggttccc

SEQ ID NO: 174518 - DNA, 15 bp, Homo sapiens
cttctcaggttccca

SEQ ID NO: 174519 - DNA, 15 bp, Homo sapiens
ttctcaggttcccag

SEQ ID NO: 174520 - DNA, 15 bp, Homo sapiens
tctcaggttcccagc

SEQ ID NO: 174521 - DNA, 15 bp, Homo sapiens
ctcaggttcccagca

SEQ ID NO: 174522 - DNA, 15 bp, Homo sapiens
tcaggttcccagcat

SEQ ID NO: 174523 - DNA, 15 bp, Homo sapiens
caggttcccagcatg

SEQ ID NO: 174524 - DNA, 15 bp, Homo sapiens
aggttcccagcatgc

SEQ ID NO: 174525 - DNA, 15 bp, Homo sapiens
ggttcccagcatgct

SEQ ID NO: 174526 - DNA, 15 bp, Homo sapiens
gttcccagcatgcta

SEQ ID NO: 174527 - DNA, 15 bp, Homo sapiens
ttcccagcatgctat

SEQ ID NO: 174528 - DNA, 15 bp, Homo sapiens
tcccagcatgctatt

SEQ ID NO: 174529 - DNA, 15 bp, Homo sapiens
cccagcatgctattt

SEQ ID NO: 174530 - DNA, 15 bp, Homo sapiens
ccagcatgctatttt

SEQ ID NO: 174531 - DNA, 15 bp, Homo sapiens
cagcatgctatttta

SEQ ID NO: 174532 - DNA, 15 bp, Homo sapiens
agcatgctattttat

SEQ ID NO: 174533 - DNA, 15 bp, Homo sapiens
gcatgctattttatt

SEQ ID NO: 174534 - DNA, 15 bp, Homo sapiens
catgctattttattg

SEQ ID NO: 174535 - DNA, 15 bp, Homo sapiens
atgctattttattga

SEQ ID NO: 174536 - DNA, 15 bp, Homo sapiens
tgctattttattgat

SEQ ID NO: 174537 - DNA, 15 bp, Homo sapiens
gctattttattgatg

SEQ ID NO: 174538 - DNA, 15 bp, Homo sapiens
ctattttattgatgt

SEQ ID NO: 174539 - DNA, 15 bp, Homo sapiens
tattttattgatgta

SEQ ID NO: 174540 - DNA, 15 bp, Homo sapiens
attttattgatgtaa

SEQ ID NO: 174541 - DNA, 15 bp, Homo sapiens
ttttattgatgtaac

SEQ ID NO: 174542 - DNA, 15 bp, Homo sapiens
tttattgatgtaaca

SEQ ID NO: 174543 - DNA, 15 bp, Homo sapiens
ttattgatgtaacaa

SEQ ID NO: 174544 - DNA, 15 bp, Homo sapiens
tattgatgtaacaac

SEQ ID NO: 174545 - DNA, 15 bp, Homo sapiens
attgatgtaacaaca

SEQ ID NO: 174546 - DNA, 15 bp, Homo sapiens
ttgatgtaacaacat

SEQ ID NO: 174547 - DNA, 15 bp, Homo sapiens
tgatgtaacaacatt

SEQ ID NO: 174548 - DNA, 15 bp, Homo sapiens
gatgtaacaacattt

SEQ ID NO: 174549 - DNA, 15 bp, Homo sapiens
atgtaacaacatttt

SEQ ID NO: 174550 - DNA, 15 bp, Homo sapiens
tgtaacaacattttc

SEQ ID NO: 174551 - DNA, 15 bp, Homo sapiens
gtaacaacattttca

SEQ ID NO: 174552 - DNA, 15 bp, Homo sapiens
taacaacattttcaa

SEQ ID NO: 174553 - DNA, 15 bp, Homo sapiens
aacaacattttcaat

SEQ ID NO: 174554 - DNA, 15 bp, Homo sapiens
acaacattttcaata

SEQ ID NO: 174555 - DNA, 15 bp, Homo sapiens
caacattttcaataa

SEQ ID NO: 174556 - DNA, 15 bp, Homo sapiens
aacattttcaataaa

SEQ ID NO: 174557 - DNA, 15 bp, Homo sapiens
acattttcaataaag

SEQ ID NO: 174558 - DNA, 15 bp, Homo sapiens
cattttcaataaagt

SEQ ID NO: 174559 - DNA, 15 bp, Homo sapiens
attttcaataaagtt

SEQ ID NO: 174560 - DNA, 15 bp, Homo sapiens
ttttcaataaagttg

SEQ ID NO: 174561 - DNA, 15 bp, Homo sapiens
tttcaataaagttgg

SEQ ID NO: 174562 - DNA, 15 bp, Homo sapiens
ttcaataaagttggt

SEQ ID NO: 174563 - DNA, 15 bp, Homo sapiens
tcaataaagttggta

SEQ ID NO: 174564 - DNA, 15 bp, Homo sapiens
caataaagttggtaa

SEQ ID NO: 174565 - DNA, 15 bp, Homo sapiens
aataaagttggtaaa

SEQ ID NO: 174566 - DNA, 15 bp, Homo sapiens
ataaagttggtaaat

SEQ ID NO: 174567 - DNA, 15 bp, Homo sapiens
taaagttggtaaatt

SEQ ID NO: 174568 - DNA, 15 bp, Homo sapiens
aaagttggtaaatta

SEQ ID NO: 174569 - DNA, 15 bp, Homo sapiens
aagttggtaaattat

SEQ ID NO: 174570 - DNA, 15 bp, Homo sapiens
agttggtaaattatc

SEQ ID NO: 174571 - DNA, 15 bp, Homo sapiens
gttggtaaattatca

SEQ ID NO: 174572 - DNA, 15 bp, Homo sapiens
ttggtaaattatcac

SEQ ID NO: 174573 - DNA, 15 bp, Homo sapiens
tggtaaattatcact

SEQ ID NO: 174574 - DNA, 15 bp, Homo sapiens
ggtaaattatcacta

SEQ ID NO: 174575 - DNA, 15 bp, Homo sapiens
gtaaattatcactat

SEQ ID NO: 174576 - DNA, 15 bp, Homo sapiens
taaattatcactata

SEQ ID NO: 174577 - DNA, 15 bp, Homo sapiens
aaattatcactatat

SEQ ID NO: 174578 - DNA, 15 bp, Homo sapiens
aattatcactatatt

SEQ ID NO: 174579 - DNA, 15 bp, Homo sapiens
attatcactatatta

SEQ ID NO: 174580 - DNA, 15 bp, Homo sapiens
ttatcactatattac

SEQ ID NO: 174581 - DNA, 15 bp, Homo sapiens
tatcactatattact

SEQ ID NO: 174582 - DNA, 15 bp, Homo sapiens
atcactatattactg

SEQ ID NO: 174583 - DNA, 15 bp, Homo sapiens
tcactatattactgt

SEQ ID NO: 174584 - DNA, 15 bp, Homo sapiens
cactatattactgtc

SEQ ID NO: 174585 - DNA, 15 bp, Homo sapiens
actatattactgtct

SEQ ID NO: 174586 - DNA, 15 bp, Homo sapiens
ctatattactgtctt

SEQ ID NO: 174587 - DNA, 15 bp, Homo sapiens
tatattactgtctta

SEQ ID NO: 174588 - DNA, 15 bp, Homo sapiens
atattactgtcttat

SEQ ID NO: 174589 - DNA, 15 bp, Homo sapiens
tattactgtcttata

SEQ ID NO: 174590 - DNA, 15 bp, Homo sapiens
attactgtcttatag

SEQ ID NO: 174591 - DNA, 15 bp, Homo sapiens
ttactgtcttatagc

SEQ ID NO: 174592 - DNA, 15 bp, Homo sapiens
tactgtcttatagca

SEQ ID NO: 174593 - DNA, 15 bp, Homo sapiens
actgtcttatagcaa

SEQ ID NO: 174594 - DNA, 15 bp, Homo sapiens
ctgtcttatagcaac

SEQ ID NO: 174595 - DNA, 15 bp, Homo sapiens
tgtcttatagcaaca

SEQ ID NO: 174596 - DNA, 15 bp, Homo sapiens
gtcttatagcaacat

SEQ ID NO: 174597 - DNA, 15 bp, Homo sapiens
tcttatagcaacata

SEQ ID NO: 174598 - DNA, 15 bp, Homo sapiens
cttatagcaacatag

SEQ ID NO: 174599 - DNA, 15 bp, Homo sapiens
ttatagcaacatagc

SEQ ID NO: 174600 - DNA, 15 bp, Homo sapiens
tatagcaacatagca

SEQ ID NO: 174601 - DNA, 15 bp, Homo sapiens
atagcaacatagcaa

SEQ ID NO: 174602 - DNA, 15 bp, Homo sapiens
tagcaacatagcaag

SEQ ID NO: 174603 - DNA, 15 bp, Homo sapiens
agcaacatagcaaga

SEQ ID NO: 174604 - DNA, 15 bp, Homo sapiens
gcaacatagcaagag

SEQ ID NO: 174605 - DNA, 15 bp, Homo sapiens
caacatagcaagagc

SEQ ID NO: 174606 - DNA, 15 bp, Homo sapiens
aacatagcaagagct

SEQ ID NO: 174607 - DNA, 15 bp, Homo sapiens
acatagcaagagctt

SEQ ID NO: 174608 - DNA, 15 bp, Homo sapiens
catagcaagagcttt

SEQ ID NO: 174609 - DNA, 15 bp, Homo sapiens
atagcaagagcttta

SEQ ID NO: 174610 - DNA, 15 bp, Homo sapiens
tagcaagagctttag

SEQ ID NO: 174611 - DNA, 15 bp, Homo sapiens
agcaagagctttaga

SEQ ID NO: 174612 - DNA, 15 bp, Homo sapiens
gcaagagctttagag

SEQ ID NO: 174613 - DNA, 15 bp, Homo sapiens
caagagctttagaga

SEQ ID NO: 174614 - DNA, 15 bp, Homo sapiens
aagagctttagagat

SEQ ID NO: 174615 - DNA, 15 bp, Homo sapiens
agagctttagagatc

SEQ ID NO: 174616 - DNA, 15 bp, Homo sapiens
gagctttagagatca

SEQ ID NO: 174617 - DNA, 15 bp, Homo sapiens
agctttagagatcat

SEQ ID NO: 174618 - DNA, 15 bp, Homo sapiens
gctttagagatcata

SEQ ID NO: 174619 - DNA, 15 bp, Homo sapiens
ctttagagatcatat

SEQ ID NO: 174620 - DNA, 15 bp, Homo sapiens
tttagagatcatata

SEQ ID NO: 174621 - DNA, 15 bp, Homo sapiens
ttagagatcatataa

SEQ ID NO: 174622 - DNA, 15 bp, Homo sapiens
tagagatcatataag

SEQ ID NO: 174623 - DNA, 15 bp, Homo sapiens
agagatcatataagt

SEQ ID NO: 174624 - DNA, 15 bp, Homo sapiens
gagatcatataagta

SEQ ID NO: 174625 - DNA, 15 bp, Homo sapiens
agatcatataagtat

SEQ ID NO: 174626 - DNA, 15 bp, Homo sapiens
gatcatataagtata

SEQ ID NO: 174627 - DNA, 15 bp, Homo sapiens
atcatataagtataa

SEQ ID NO: 174628 - DNA, 15 bp, Homo sapiens
tcatataagtataaa

SEQ ID NO: 174629 - DNA, 15 bp, Homo sapiens
catataagtataaaa

SEQ ID NO: 174630 - DNA, 15 bp, Homo sapiens
atataagtataaaat

SEQ ID NO: 174631 - DNA, 15 bp, Homo sapiens
tataagtataaaatg

SEQ ID NO: 174632 - DNA, 15 bp, Homo sapiens
ataagtataaaatgt

SEQ ID NO: 174633 - DNA, 15 bp, Homo sapiens
taagtataaaatgtg

SEQ ID NO: 174634 - DNA, 15 bp, Homo sapiens
aagtataaaatgtga

SEQ ID NO: 174635 - DNA, 15 bp, Homo sapiens
agtataaaatgtgaa

SEQ ID NO: 174636 - DNA, 15 bp, Homo sapiens
gtataaaatgtgaat

SEQ ID NO: 174637 - DNA, 15 bp, Homo sapiens
tataaaatgtgaatt

SEQ ID NO: 174638 - DNA, 15 bp, Homo sapiens
ataaaatgtgaattt

SEQ ID NO: 174639 - DNA, 15 bp, Homo sapiens
taaaatgtgaattta

SEQ ID NO: 174640 - DNA, 15 bp, Homo sapiens
aaaatgtgaatttaa

SEQ ID NO: 174641 - DNA, 15 bp, Homo sapiens
aaatgtgaatttaaa

SEQ ID NO: 174642 - DNA, 15 bp, Homo sapiens
aatgtgaatttaaaa

SEQ ID NO: 174643 - DNA, 15 bp, Homo sapiens
atgtgaatttaaaaa

SEQ ID NO: 174644 - DNA, 15 bp, Homo sapiens
tgtgaatttaaaaaa

SEQ ID NO: 174645 - DNA, 15 bp, Homo sapiens
gtgaatttaaaaaaa

SEQ ID NO: 174646 - DNA, 15 bp, Homo sapiens
tgaatttaaaaaaac

SEQ ID NO: 174647 - DNA, 15 bp, Homo sapiens
gaatttaaaaaaaca

SEQ ID NO: 174648 - DNA, 15 bp, Homo sapiens
aatttaaaaaaacaa

SEQ ID NO: 174649 - DNA, 15 bp, Homo sapiens
atttaaaaaaacaat

SEQ ID NO: 174650 - DNA, 15 bp, Homo sapiens
tttaaaaaaacaatg

SEQ ID NO: 174651 - DNA, 15 bp, Homo sapiens
ttaaaaaaacaatga

SEQ ID NO: 174652 - DNA, 15 bp, Homo sapiens
taaaaaaacaatgaa

SEQ ID NO: 174653 - DNA, 15 bp, Homo sapiens
aaaaaaacaatgaat

SEQ ID NO: 174654 - DNA, 15 bp, Homo sapiens
aaaaaacaatgaata

SEQ ID NO: 174655 - DNA, 15 bp, Homo sapiens
aaaaacaatgaatat

SEQ ID NO: 174656 - DNA, 15 bp, Homo sapiens
aaaacaatgaatatg

SEQ ID NO: 174657 - DNA, 15 bp, Homo sapiens
aaacaatgaatatgc

SEQ ID NO: 174658 - DNA, 15 bp, Homo sapiens
aacaatgaatatgca

SEQ ID NO: 174659 - DNA, 15 bp, Homo sapiens
acaatgaatatgcag

SEQ ID NO: 174660 - DNA, 15 bp, Homo sapiens
caatgaatatgcagg

SEQ ID NO: 174661 - DNA, 15 bp, Homo sapiens
aatgaatatgcagga

SEQ ID NO: 174662 - DNA, 15 bp, Homo sapiens
atgaatatgcaggat

SEQ ID NO: 174663 - DNA, 15 bp, Homo sapiens
tgaatatgcaggatt

SEQ ID NO: 174664 - DNA, 15 bp, Homo sapiens
gaatatgcaggattt

SEQ ID NO: 174665 - DNA, 15 bp, Homo sapiens
aatatgcaggatttt

SEQ ID NO: 174666 - DNA, 15 bp, Homo sapiens
atatgcaggattttt

SEQ ID NO: 174667 - DNA, 15 bp, Homo sapiens
tatgcaggattttta

SEQ ID NO: 174668 - DNA, 15 bp, Homo sapiens
atgcaggatttttat

SEQ ID NO: 174669 - DNA, 15 bp, Homo sapiens
tgcaggatttttatt

SEQ ID NO: 174670 - DNA, 15 bp, Homo sapiens
gcaggatttttatta

SEQ ID NO: 174671 - DNA, 15 bp, Homo sapiens
caggatttttattag

SEQ ID NO: 174672 - DNA, 15 bp, Homo sapiens
aggatttttattagg

SEQ ID NO: 174673 - DNA, 15 bp, Homo sapiens
ggatttttattaggg

SEQ ID NO: 174674 - DNA, 15 bp, Homo sapiens
gatttttattagggc

SEQ ID NO: 174675 - DNA, 15 bp, Homo sapiens
atttttattagggca

SEQ ID NO: 174676 - DNA, 15 bp, Homo sapiens
tttttattagggcaa

SEQ ID NO: 174677 - DNA, 15 bp, Homo sapiens
ttttattagggcaag

SEQ ID NO: 174678 - DNA, 15 bp, Homo sapiens
tttattagggcaagc

SEQ ID NO: 174679 - DNA, 15 bp, Homo sapiens
ttattagggcaagcg

SEQ ID NO: 174680 - DNA, 15 bp, Homo sapiens
tattagggcaagcgt

SEQ ID NO: 174681 - DNA, 15 bp, Homo sapiens
attagggcaagcgtt

SEQ ID NO: 174682 - DNA, 15 bp, Homo sapiens
ttagggcaagcgttt

SEQ ID NO: 174683 - DNA, 15 bp, Homo sapiens
tagggcaagcgtttc

SEQ ID NO: 174684 - DNA, 15 bp, Homo sapiens
agggcaagcgtttcc

SEQ ID NO: 174685 - DNA, 15 bp, Homo sapiens
gggcaagcgtttcca

SEQ ID NO: 174686 - DNA, 15 bp, Homo sapiens
ggcaagcgtttccat

SEQ ID NO: 174687 - DNA, 15 bp, Homo sapiens
gcaagcgtttccata

SEQ ID NO: 174688 - DNA, 15 bp, Homo sapiens
caagcgtttccataa

SEQ ID NO: 174689 - DNA, 15 bp, Homo sapiens
aagcgtttccataac

SEQ ID NO: 174690 - DNA, 15 bp, Homo sapiens
agcgtttccataacc

SEQ ID NO: 174691 - DNA, 15 bp, Homo sapiens
gcgtttccataacca

SEQ ID NO: 174692 - DNA, 15 bp, Homo sapiens
cgtttccataaccat

SEQ ID NO: 174693 - DNA, 15 bp, Homo sapiens
gtttccataaccata

SEQ ID NO: 174694 - DNA, 15 bp, Homo sapiens
tttccataaccataa

SEQ ID NO: 174695 - DNA, 15 bp, Homo sapiens
ttccataaccataaa

SEQ ID NO: 174696 - DNA, 15 bp, Homo sapiens
tccataaccataaat

SEQ ID NO: 174697 - DNA, 15 bp, Homo sapiens
ccataaccataaata

SEQ ID NO: 174698 - DNA, 15 bp, Homo sapiens
cataaccataaatat

SEQ ID NO: 174699 - DNA, 15 bp, Homo sapiens
ataaccataaatatt

SEQ ID NO: 174700 - DNA, 15 bp, Homo sapiens
taaccataaatattt

SEQ ID NO: 174701 - DNA, 15 bp, Homo sapiens
aaccataaatatttc

SEQ ID NO: 174702 - DNA, 15 bp, Homo sapiens
accataaatatttct

SEQ ID NO: 174703 - DNA, 15 bp, Homo sapiens
ccataaatatttctt

SEQ ID NO: 174704 - DNA, 15 bp, Homo sapiens
cataaatatttcttt

SEQ ID NO: 174705 - DNA, 15 bp, Homo sapiens
ataaatatttcttta

SEQ ID NO: 174706 - DNA, 15 bp, Homo sapiens
taaatatttctttaa

SEQ ID NO: 174707 - DNA, 15 bp, Homo sapiens
aaatatttctttaaa

SEQ ID NO: 174708 - DNA, 15 bp, Homo sapiens
aatatttctttaaaa

SEQ ID NO: 174709 - DNA, 15 bp, Homo sapiens
atatttctttaaaac

SEQ ID NO: 174710 - DNA, 15 bp, Homo sapiens
tatttctttaaaaca

SEQ ID NO: 174711 - DNA, 15 bp, Homo sapiens
atttctttaaaacaa

SEQ ID NO: 174712 - DNA, 15 bp, Homo sapiens
tttctttaaaacaaa

SEQ ID NO: 174713 - DNA, 15 bp, Homo sapiens
ttctttaaaacaaat

SEQ ID NO: 174714 - DNA, 15 bp, Homo sapiens
tctttaaaacaaata

SEQ ID NO: 174715 - DNA, 15 bp, Homo sapiens
ctttaaaacaaataa

SEQ ID NO: 174716 - DNA, 15 bp, Homo sapiens
tttaaaacaaataaa

SEQ ID NO: 174717 - DNA, 15 bp, Homo sapiens
ttaaaacaaataaat

SEQ ID NO: 174718 - DNA, 15 bp, Homo sapiens
taaaacaaataaatg

SEQ ID NO: 174719 - DNA, 15 bp, Homo sapiens
aaaacaaataaatgt

SEQ ID NO: 174720 - DNA, 15 bp, Homo sapiens
aaacaaataaatgtc

SEQ ID NO: 174721 - DNA, 15 bp, Homo sapiens
aacaaataaatgtcc

SEQ ID NO: 174722 - DNA, 15 bp, Homo sapiens
acaaataaatgtccc

SEQ ID NO: 174723 - DNA, 15 bp, Homo sapiens
caaataaatgtccca

SEQ ID NO: 174724 - DNA, 15 bp, Homo sapiens
aaataaatgtcccaa

SEQ ID NO: 174725 - DNA, 15 bp, Homo sapiens
aataaatgtcccaag

SEQ ID NO: 174726 - DNA, 15 bp, Homo sapiens
ataaatgtcccaaga

SEQ ID NO: 174727 - DNA, 15 bp, Homo sapiens
taaatgtcccaagat

SEQ ID NO: 174728 - DNA, 15 bp, Homo sapiens
aaatgtcccaagatc

SEQ ID NO: 174729 - DNA, 15 bp, Homo sapiens
aatgtcccaagatct

SEQ ID NO: 174730 - DNA, 15 bp, Homo sapiens
atgtcccaagatctc

SEQ ID NO: 174731 - DNA, 15 bp, Homo sapiens
tgtcccaagatctct

SEQ ID NO: 174732 - DNA, 15 bp, Homo sapiens
gtcccaagatctctg

SEQ ID NO: 174733 - DNA, 15 bp, Homo sapiens
tcccaagatctctgt

SEQ ID NO: 174734 - DNA, 15 bp, Homo sapiens
cccaagatctctgtt

SEQ ID NO: 174735 - DNA, 15 bp, Homo sapiens
ccaagatctctgtta

SEQ ID NO: 174736 - DNA, 15 bp, Homo sapiens
caagatctctgttag

SEQ ID NO: 174737 - DNA, 15 bp, Homo sapiens
aagatctctgttagt

SEQ ID NO: 174738 - DNA, 15 bp, Homo sapiens
agatctctgttagtg

SEQ ID NO: 174739 - DNA, 15 bp, Homo sapiens
gatctctgttagtga

SEQ ID NO: 174740 - DNA, 15 bp, Homo sapiens
atctctgttagtgat

SEQ ID NO: 174741 - DNA, 15 bp, Homo sapiens
tctctgttagtgatc

SEQ ID NO: 174742 - DNA, 15 bp, Homo sapiens
ctctgttagtgatcc

SEQ ID NO: 174743 - DNA, 15 bp, Homo sapiens
tctgttagtgatcca

SEQ ID NO: 174744 - DNA, 15 bp, Homo sapiens
ctgttagtgatccaa

SEQ ID NO: 174745 - DNA, 15 bp, Homo sapiens
tgttagtgatccaaa

SEQ ID NO: 174746 - DNA, 15 bp, Homo sapiens
gttagtgatccaaac

SEQ ID NO: 174747 - DNA, 15 bp, Homo sapiens
ttagtgatccaaact

SEQ ID NO: 174748 - DNA, 15 bp, Homo sapiens
tagtgatccaaacta

SEQ ID NO: 174749 - DNA, 15 bp, Homo sapiens
agtgatccaaactaa

SEQ ID NO: 174750 - DNA, 15 bp, Homo sapiens
gtgatccaaactaag

SEQ ID NO: 174751 - DNA, 15 bp, Homo sapiens
tgatccaaactaagt

SEQ ID NO: 174752 - DNA, 15 bp, Homo sapiens
gatccaaactaagta

SEQ ID NO: 174753 - DNA, 15 bp, Homo sapiens
atccaaactaagtag

SEQ ID NO: 174754 - DNA, 15 bp, Homo sapiens
tccaaactaagtaga

SEQ ID NO: 174755 - DNA, 15 bp, Homo sapiens
ccaaactaagtagaa

SEQ ID NO: 174756 - DNA, 15 bp, Homo sapiens
caaactaagtagaaa

SEQ ID NO: 174757 - DNA, 15 bp, Homo sapiens
aaactaagtagaaat

SEQ ID NO: 174758 - DNA, 15 bp, Homo sapiens
aactaagtagaaatt

SEQ ID NO: 174759 - DNA, 15 bp, Homo sapiens
actaagtagaaatta

SEQ ID NO: 174760 - DNA, 15 bp, Homo sapiens
ctaagtagaaattag

SEQ ID NO: 174761 - DNA, 15 bp, Homo sapiens
taagtagaaattagt

SEQ ID NO: 174762 - DNA, 15 bp, Homo sapiens
aagtagaaattagta

SEQ ID NO: 174763 - DNA, 15 bp, Homo sapiens
agtagaaattagtaa

SEQ ID NO: 174764 - DNA, 15 bp, Homo sapiens
gtagaaattagtaaa

SEQ ID NO: 174765 - DNA, 15 bp, Homo sapiens
tagaaattagtaaaa

SEQ ID NO: 174766 - DNA, 15 bp, Homo sapiens
agaaattagtaaaat

SEQ ID NO: 174767 - DNA, 15 bp, Homo sapiens
gaaattagtaaaatt

SEQ ID NO: 174768 - DNA, 15 bp, Homo sapiens
aaattagtaaaatta

SEQ ID NO: 174769 - DNA, 15 bp, Homo sapiens
aattagtaaaattaa

SEQ ID NO: 174770 - DNA, 15 bp, Homo sapiens
attagtaaaattaat

SEQ ID NO: 174771 - DNA, 15 bp, Homo sapiens
ttagtaaaattaatt

SEQ ID NO: 174772 - DNA, 15 bp, Homo sapiens
tagtaaaattaatta

SEQ ID NO: 174773 - DNA, 15 bp, Homo sapiens
agtaaaattaattat

SEQ ID NO: 174774 - DNA, 15 bp, Homo sapiens
gtaaaattaattata

SEQ ID NO: 174775 - DNA, 15 bp, Homo sapiens
taaaattaattataa

SEQ ID NO: 174776 - DNA, 15 bp, Homo sapiens
aaaattaattataaa

SEQ ID NO: 174777 - DNA, 15 bp, Homo sapiens
aaattaattataaat

SEQ ID NO: 174778 - DNA, 15 bp, Homo sapiens
aattaattataaatg

SEQ ID NO: 174779 - DNA, 15 bp, Homo sapiens
attaattataaatga

SEQ ID NO: 174780 - DNA, 15 bp, Homo sapiens
ttaattataaatgaa

SEQ ID NO: 174781 - DNA, 15 bp, Homo sapiens
taattataaatgaac

SEQ ID NO: 174782 - DNA, 15 bp, Homo sapiens
aattataaatgaaca

SEQ ID NO: 174783 - DNA, 15 bp, Homo sapiens
attataaatgaacaa

SEQ ID NO: 174784 - DNA, 15 bp, Homo sapiens
ttataaatgaacaat

SEQ ID NO: 174785 - DNA, 15 bp, Homo sapiens
tataaatgaacaatt

SEQ ID NO: 174786 - DNA, 15 bp, Homo sapiens
ataaatgaacaattt

SEQ ID NO: 174787 - DNA, 15 bp, Homo sapiens
taaatgaacaatttc

SEQ ID NO: 174788 - DNA, 15 bp, Homo sapiens
aaatgaacaatttca

SEQ ID NO: 174789 - DNA, 15 bp, Homo sapiens
aatgaacaatttcag

SEQ ID NO: 174790 - DNA, 15 bp, Homo sapiens
atgaacaatttcagc

SEQ ID NO: 174791 - DNA, 15 bp, Homo sapiens
tgaacaatttcagca

SEQ ID NO: 174792 - DNA, 15 bp, Homo sapiens
gaacaatttcagcat

SEQ ID NO: 174793 - DNA, 15 bp, Homo sapiens
aacaatttcagcata

SEQ ID NO: 174794 - DNA, 15 bp, Homo sapiens
acaatttcagcatat

SEQ ID NO: 174795 - DNA, 15 bp, Homo sapiens
caatttcagcatata

SEQ ID NO: 174796 - DNA, 15 bp, Homo sapiens
aatttcagcatataa

SEQ ID NO: 174797 - DNA, 15 bp, Homo sapiens
atttcagcatataaa

SEQ ID NO: 174798 - DNA, 15 bp, Homo sapiens
tttcagcatataaac

SEQ ID NO: 174799 - DNA, 15 bp, Homo sapiens
ttcagcatataaacc

SEQ ID NO: 174800 - DNA, 15 bp, Homo sapiens
tcagcatataaacca

SEQ ID NO: 174801 - DNA, 15 bp, Homo sapiens
cagcatataaaccaa

SEQ ID NO: 174802 - DNA, 15 bp, Homo sapiens
agcatataaaccaac

SEQ ID NO: 174803 - DNA, 15 bp, Homo sapiens
gcatataaaccaaca

SEQ ID NO: 174804 - DNA, 15 bp, Homo sapiens
catataaaccaacaa

SEQ ID NO: 174805 - DNA, 15 bp, Homo sapiens
atataaaccaacaag

SEQ ID NO: 174806 - DNA, 15 bp, Homo sapiens
tataaaccaacaagt

SEQ ID NO: 174807 - DNA, 15 bp, Homo sapiens
ataaaccaacaagtc

SEQ ID NO: 174808 - DNA, 15 bp, Homo sapiens
taaaccaacaagtct

SEQ ID NO: 174809 - DNA, 15 bp, Homo sapiens
aaaccaacaagtctt

SEQ ID NO: 174810 - DNA, 15 bp, Homo sapiens
aaccaacaagtcttt

SEQ ID NO: 174811 - DNA, 15 bp, Homo sapiens
accaacaagtctttt

SEQ ID NO: 174812 - DNA, 15 bp, Homo sapiens
ccaacaagtcttttc

SEQ ID NO: 174813 - DNA, 15 bp, Homo sapiens
caacaagtcttttct

SEQ ID NO: 174814 - DNA, 15 bp, Homo sapiens
aacaagtcttttcta

SEQ ID NO: 174815 - DNA, 15 bp, Homo sapiens
acaagtcttttctag

SEQ ID NO: 174816 - DNA, 15 bp, Homo sapiens
caagtcttttctaga

SEQ ID NO: 174817 - DNA, 15 bp, Homo sapiens
aagtcttttctagat

SEQ ID NO: 174818 - DNA, 15 bp, Homo sapiens
agtcttttctagatt

SEQ ID NO: 174819 - DNA, 15 bp, Homo sapiens
gtcttttctagattt

SEQ ID NO: 174820 - DNA, 15 bp, Homo sapiens
tcttttctagatttt

SEQ ID NO: 174821 - DNA, 15 bp, Homo sapiens
cttttctagattttt

SEQ ID NO: 174822 - DNA, 15 bp, Homo sapiens
ttttctagattttta

SEQ ID NO: 174823 - DNA, 15 bp, Homo sapiens
tttctagatttttaa

SEQ ID NO: 174824 - DNA, 15 bp, Homo sapiens
ttctagatttttaac

SEQ ID NO: 174825 - DNA, 15 bp, Homo sapiens
tctagatttttaaca

SEQ ID NO: 174826 - DNA, 15 bp, Homo sapiens
ctagatttttaacac

SEQ ID NO: 174827 - DNA, 15 bp, Homo sapiens
tagatttttaacact

SEQ ID NO: 174828 - DNA, 15 bp, Homo sapiens
agatttttaacactg

SEQ ID NO: 174829 - DNA, 15 bp, Homo sapiens
gatttttaacactgt

SEQ ID NO: 174830 - DNA, 15 bp, Homo sapiens
atttttaacactgtg

SEQ ID NO: 174831 - DNA, 15 bp, Homo sapiens
tttttaacactgtga

SEQ ID NO: 174832 - DNA, 15 bp, Homo sapiens
ttttaacactgtgac

SEQ ID NO: 174833 - DNA, 15 bp, Homo sapiens
tttaacactgtgacc

SEQ ID NO: 174834 - DNA, 15 bp, Homo sapiens
ttaacactgtgaccc

SEQ ID NO: 174835 - DNA, 15 bp, Homo sapiens
taacactgtgaccca

SEQ ID NO: 174836 - DNA, 15 bp, Homo sapiens
aacactgtgacccaa

SEQ ID NO: 174837 - DNA, 15 bp, Homo sapiens
acactgtgacccaat

SEQ ID NO: 174838 - DNA, 15 bp, Homo sapiens
cactgtgacccaatt

SEQ ID NO: 174839 - DNA, 15 bp, Homo sapiens
actgtgacccaattg

SEQ ID NO: 174840 - DNA, 15 bp, Homo sapiens
ctgtgacccaattgc

SEQ ID NO: 174841 - DNA, 15 bp, Homo sapiens
tgtgacccaattgca

SEQ ID NO: 174842 - DNA, 15 bp, Homo sapiens
gtgacccaattgcat

SEQ ID NO: 174843 - DNA, 15 bp, Homo sapiens
tgacccaattgcatt

SEQ ID NO: 174844 - DNA, 15 bp, Homo sapiens
gacccaattgcatta

SEQ ID NO: 174845 - DNA, 15 bp, Homo sapiens
acccaattgcattat

SEQ ID NO: 174846 - DNA, 15 bp, Homo sapiens
cccaattgcattatt

SEQ ID NO: 174847 - DNA, 15 bp, Homo sapiens
ccaattgcattattt

SEQ ID NO: 174848 - DNA, 15 bp, Homo sapiens
caattgcattatttt

SEQ ID NO: 174849 - DNA, 15 bp, Homo sapiens
aattgcattattttc

SEQ ID NO: 174850 - DNA, 15 bp, Homo sapiens
attgcattattttcc

SEQ ID NO: 174851 - DNA, 15 bp, Homo sapiens
ttgcattattttcca

SEQ ID NO: 174852 - DNA, 15 bp, Homo sapiens
tgcattattttccaa

SEQ ID NO: 174853 - DNA, 15 bp, Homo sapiens
gcattattttccaag

SEQ ID NO: 174854 - DNA, 15 bp, Homo sapiens
cattattttccaagt

SEQ ID NO: 174855 - DNA, 15 bp, Homo sapiens
attattttccaagtt

SEQ ID NO: 174856 - DNA, 15 bp, Homo sapiens
ttattttccaagtta

SEQ ID NO: 174857 - DNA, 15 bp, Homo sapiens
tattttccaagttag

SEQ ID NO: 174858 - DNA, 15 bp, Homo sapiens
attttccaagttaga

SEQ ID NO: 174859 - DNA, 15 bp, Homo sapiens
ttttccaagttagaa

SEQ ID NO: 174860 - DNA, 15 bp, Homo sapiens
tttccaagttagaat

SEQ ID NO: 174861 - DNA, 15 bp, Homo sapiens
ttccaagttagaatg

SEQ ID NO: 174862 - DNA, 15 bp, Homo sapiens
tccaagttagaatga

SEQ ID NO: 174863 - DNA, 15 bp, Homo sapiens
ccaagttagaatgac

SEQ ID NO: 174864 - DNA, 15 bp, Homo sapiens
caagttagaatgact

SEQ ID NO: 174865 - DNA, 15 bp, Homo sapiens
aagttagaatgacta

SEQ ID NO: 174866 - DNA, 15 bp, Homo sapiens
agttagaatgactaa

SEQ ID NO: 174867 - DNA, 15 bp, Homo sapiens
gttagaatgactaat

SEQ ID NO: 174868 - DNA, 15 bp, Homo sapiens
ttagaatgactaata

SEQ ID NO: 174869 - DNA, 15 bp, Homo sapiens
tagaatgactaataa

SEQ ID NO: 174870 - DNA, 15 bp, Homo sapiens
agaatgactaataat

SEQ ID NO: 174871 - DNA, 15 bp, Homo sapiens
gaatgactaataatc

SEQ ID NO: 174872 - DNA, 15 bp, Homo sapiens
aatgactaataatca

SEQ ID NO: 174873 - DNA, 15 bp, Homo sapiens
atgactaataatcaa

SEQ ID NO: 174874 - DNA, 15 bp, Homo sapiens
tgactaataatcaat

SEQ ID NO: 174875 - DNA, 15 bp, Homo sapiens
gactaataatcaatg

SEQ ID NO: 174876 - DNA, 15 bp, Homo sapiens
actaataatcaatga

SEQ ID NO: 174877 - DNA, 15 bp, Homo sapiens
ctaataatcaatgaa

SEQ ID NO: 174878 - DNA, 15 bp, Homo sapiens
taataatcaatgaat

SEQ ID NO: 174879 - DNA, 15 bp, Homo sapiens
aataatcaatgaatg

SEQ ID NO: 174880 - DNA, 15 bp, Homo sapiens
ataatcaatgaatgt

SEQ ID NO: 174881 - DNA, 15 bp, Homo sapiens
taatcaatgaatgta

SEQ ID NO: 174882 - DNA, 15 bp, Homo sapiens
aatcaatgaatgtaa

SEQ ID NO: 174883 - DNA, 15 bp, Homo sapiens
atcaatgaatgtaaa

SEQ ID NO: 174884 - DNA, 15 bp, Homo sapiens
tcaatgaatgtaaaa

SEQ ID NO: 174885 - DNA, 15 bp, Homo sapiens
caatgaatgtaaaag

SEQ ID NO: 174886 - DNA, 15 bp, Homo sapiens
aatgaatgtaaaagc

SEQ ID NO: 174887 - DNA, 15 bp, Homo sapiens
atgaatgtaaaagca

SEQ ID NO: 174888 - DNA, 15 bp, Homo sapiens
tgaatgtaaaagcaa

SEQ ID NO: 174889 - DNA, 15 bp, Homo sapiens
gaatgtaaaagcaat

SEQ ID NO: 174890 - DNA, 15 bp, Homo sapiens
aatgtaaaagcaata

SEQ ID NO: 174891 - DNA, 15 bp, Homo sapiens
atgtaaaagcaataa

SEQ ID NO: 174892 - DNA, 15 bp, Homo sapiens
tgtaaaagcaataat

SEQ ID NO: 174893 - DNA, 15 bp, Homo sapiens
gtaaaagcaataatt

SEQ ID NO: 174894 - DNA, 15 bp, Homo sapiens
taaaagcaataatta

SEQ ID NO: 174895 - DNA, 15 bp, Homo sapiens
aaaagcaataattaa

SEQ ID NO: 174896 - DNA, 15 bp, Homo sapiens
aaagcaataattaat

SEQ ID NO: 174897 - DNA, 15 bp, Homo sapiens
aagcaataattaata

SEQ ID NO: 174898 - DNA, 15 bp, Homo sapiens
agcaataattaatac

SEQ ID NO: 174899 - DNA, 15 bp, Homo sapiens
gcaataattaataca

SEQ ID NO: 174900 - DNA, 15 bp, Homo sapiens
caataattaatacag

SEQ ID NO: 174901 - DNA, 15 bp, Homo sapiens
aataattaatacaga

SEQ ID NO: 174902 - DNA, 15 bp, Homo sapiens
ataattaatacagat

SEQ ID NO: 174903 - DNA, 15 bp, Homo sapiens
taattaatacagatg

SEQ ID NO: 174904 - DNA, 15 bp, Homo sapiens
aattaatacagatga

SEQ ID NO: 174905 - DNA, 15 bp, Homo sapiens
attaatacagatgac

SEQ ID NO: 174906 - DNA, 15 bp, Homo sapiens
ttaatacagatgaca

SEQ ID NO: 174907 - DNA, 15 bp, Homo sapiens
taatacagatgacat

SEQ ID NO: 174908 - DNA, 15 bp, Homo sapiens
aatacagatgacatt

SEQ ID NO: 174909 - DNA, 15 bp, Homo sapiens
atacagatgacattg

SEQ ID NO: 174910 - DNA, 15 bp, Homo sapiens
tacagatgacattgt

SEQ ID NO: 174911 - DNA, 15 bp, Homo sapiens
acagatgacattgta

SEQ ID NO: 174912 - DNA, 15 bp, Homo sapiens
cagatgacattgtac

SEQ ID NO: 174913 - DNA, 15 bp, Homo sapiens
agatgacattgtact

SEQ ID NO: 174914 - DNA, 15 bp, Homo sapiens
gatgacattgtactt

SEQ ID NO: 174915 - DNA, 15 bp, Homo sapiens
atgacattgtacttt

SEQ ID NO: 174916 - DNA, 15 bp, Homo sapiens
tgacattgtactttt

SEQ ID NO: 174917 - DNA, 15 bp, Homo sapiens
gacattgtacttttc

SEQ ID NO: 174918 - DNA, 15 bp, Homo sapiens
acattgtacttttcc

SEQ ID NO: 174919 - DNA, 15 bp, Homo sapiens
cattgtacttttcca

SEQ ID NO: 174920 - DNA, 15 bp, Homo sapiens
attgtacttttccac

SEQ ID NO: 174921 - DNA, 15 bp, Homo sapiens
ttgtacttttccaca

SEQ ID NO: 174922 - DNA, 15 bp, Homo sapiens
tgtacttttccacag

SEQ ID NO: 174923 - DNA, 15 bp, Homo sapiens
gtacttttccacagt

SEQ ID NO: 174924 - DNA, 15 bp, Homo sapiens
tacttttccacagta

SEQ ID NO: 174925 - DNA, 15 bp, Homo sapiens
acttttccacagtaa

SEQ ID NO: 174926 - DNA, 15 bp, Homo sapiens
cttttccacagtaaa

SEQ ID NO: 174927 - DNA, 15 bp, Homo sapiens
ttttccacagtaaag

SEQ ID NO: 174928 - DNA, 15 bp, Homo sapiens
tttccacagtaaaga

SEQ ID NO: 174929 - DNA, 15 bp, Homo sapiens
ttccacagtaaagaa

SEQ ID NO: 174930 - DNA, 15 bp, Homo sapiens
tccacagtaaagaaa

SEQ ID NO: 174931 - DNA, 15 bp, Homo sapiens
ccacagtaaagaaat

SEQ ID NO: 174932 - DNA, 15 bp, Homo sapiens
cacagtaaagaaata

SEQ ID NO: 174933 - DNA, 15 bp, Homo sapiens
acagtaaagaaataa

SEQ ID NO: 174934 - DNA, 15 bp, Homo sapiens
cagtaaagaaataaa

SEQ ID NO: 174935 - DNA, 15 bp, Homo sapiens
agtaaagaaataaac

SEQ ID NO: 174936 - DNA, 15 bp, Homo sapiens
gtaaagaaataaaca

SEQ ID NO: 174937 - DNA, 15 bp, Homo sapiens
taaagaaataaacaa

SEQ ID NO: 174938 - DNA, 15 bp, Homo sapiens
aaagaaataaacaat

SEQ ID NO: 174939 - DNA, 15 bp, Homo sapiens
aagaaataaacaatc

SEQ ID NO: 174940 - DNA, 15 bp, Homo sapiens
agaaataaacaatct

SEQ ID NO: 174941 - DNA, 15 bp, Homo sapiens
gaaataaacaatcta

SEQ ID NO: 174942 - DNA, 15 bp, Homo sapiens
aaataaacaatctaa

SEQ ID NO: 174943 - DNA, 15 bp, Homo sapiens
aataaacaatctaat

SEQ ID NO: 174944 - DNA, 15 bp, Homo sapiens
ataaacaatctaata

SEQ ID NO: 174945 - DNA, 15 bp, Homo sapiens
taaacaatctaatat

SEQ ID NO: 174946 - DNA, 15 bp, Homo sapiens
aaacaatctaatatt

SEQ ID NO: 174947 - DNA, 15 bp, Homo sapiens
aacaatctaatattt

SEQ ID NO: 174948 - DNA, 15 bp, Homo sapiens
acaatctaatatttt

SEQ ID NO: 174949 - DNA, 15 bp, Homo sapiens
caatctaatattttt

SEQ ID NO: 174950 - DNA, 15 bp, Homo sapiens
aatctaatattttta

SEQ ID NO: 174951 - DNA, 15 bp, Homo sapiens
atctaatatttttat

SEQ ID NO: 174952 - DNA, 15 bp, Homo sapiens
tctaatatttttata

SEQ ID NO: 174953 - DNA, 15 bp, Homo sapiens
ctaatatttttataa

SEQ ID NO: 174954 - DNA, 15 bp, Homo sapiens
taatatttttataaa

SEQ ID NO: 174955 - DNA, 15 bp, Homo sapiens
aatatttttataaat

SEQ ID NO: 174956 - DNA, 15 bp, Homo sapiens
atatttttataaatc

SEQ ID NO: 174957 - DNA, 15 bp, Homo sapiens
tatttttataaatcc

SEQ ID NO: 174958 - DNA, 15 bp, Homo sapiens
atttttataaatccc

SEQ ID NO: 174959 - DNA, 15 bp, Homo sapiens
tttttataaatccca

SEQ ID NO: 174960 - DNA, 15 bp, Homo sapiens
ttttataaatcccat

SEQ ID NO: 174961 - DNA, 15 bp, Homo sapiens
tttataaatcccatt

SEQ ID NO: 174962 - DNA, 15 bp, Homo sapiens
ttataaatcccattt

SEQ ID NO: 174963 - DNA, 15 bp, Homo sapiens
tataaatcccatttt

SEQ ID NO: 174964 - DNA, 15 bp, Homo sapiens
ataaatcccatttta

SEQ ID NO: 174965 - DNA, 15 bp, Homo sapiens
taaatcccattttat

SEQ ID NO: 174966 - DNA, 15 bp, Homo sapiens
aaatcccattttata

SEQ ID NO: 174967 - DNA, 15 bp, Homo sapiens
aatcccattttatat

SEQ ID NO: 174968 - DNA, 15 bp, Homo sapiens
atcccattttatatc

SEQ ID NO: 174969 - DNA, 15 bp, Homo sapiens
tcccattttatatca

SEQ ID NO: 174970 - DNA, 15 bp, Homo sapiens
cccattttatatcac

SEQ ID NO: 174971 - DNA, 15 bp, Homo sapiens
ccattttatatcaca

SEQ ID NO: 174972 - DNA, 15 bp, Homo sapiens
cattttatatcacaa

SEQ ID NO: 174973 - DNA, 15 bp, Homo sapiens
attttatatcacaaa

SEQ ID NO: 174974 - DNA, 15 bp, Homo sapiens
ttttatatcacaaaa

SEQ ID NO: 174975 - DNA, 15 bp, Homo sapiens
tttatatcacaaaat

SEQ ID NO: 174976 - DNA, 15 bp, Homo sapiens
ttatatcacaaaata

SEQ ID NO: 174977 - DNA, 15 bp, Homo sapiens
tatatcacaaaataa

SEQ ID NO: 174978 - DNA, 15 bp, Homo sapiens
atatcacaaaataac

SEQ ID NO: 174979 - DNA, 15 bp, Homo sapiens
tatcacaaaataacc

SEQ ID NO: 174980 - DNA, 15 bp, Homo sapiens
atcacaaaataacct

SEQ ID NO: 174981 - DNA, 15 bp, Homo sapiens
tcacaaaataacctt

SEQ ID NO: 174982 - DNA, 15 bp, Homo sapiens
cacaaaataaccttt

SEQ ID NO: 174983 - DNA, 15 bp, Homo sapiens
acaaaataaccttta

SEQ ID NO: 174984 - DNA, 15 bp, Homo sapiens
caaaataacctttac

SEQ ID NO: 174985 - DNA, 15 bp, Homo sapiens
aaaataacctttact

SEQ ID NO: 174986 - DNA, 15 bp, Homo sapiens
aaataacctttacta

SEQ ID NO: 174987 - DNA, 15 bp, Homo sapiens
aataacctttactaa

SEQ ID NO: 174988 - DNA, 15 bp, Homo sapiens
ataacctttactaag

SEQ ID NO: 174989 - DNA, 15 bp, Homo sapiens
taacctttactaagc

SEQ ID NO: 174990 - DNA, 15 bp, Homo sapiens
aacctttactaagca

SEQ ID NO: 174991 - DNA, 15 bp, Homo sapiens
acctttactaagcaa

SEQ ID NO: 174992 - DNA, 15 bp, Homo sapiens
cctttactaagcaaa

SEQ ID NO: 174993 - DNA, 15 bp, Homo sapiens
ctttactaagcaaat

SEQ ID NO: 174994 - DNA, 15 bp, Homo sapiens
tttactaagcaaatt

SEQ ID NO: 174995 - DNA, 15 bp, Homo sapiens
ttactaagcaaattt

SEQ ID NO: 174996 - DNA, 15 bp, Homo sapiens
tactaagcaaatttt

SEQ ID NO: 174997 - DNA, 15 bp, Homo sapiens
actaagcaaattttt

SEQ ID NO: 174998 - DNA, 15 bp, Homo sapiens
ctaagcaaatttttt

SEQ ID NO: 174999 - DNA, 15 bp, Homo sapiens
taagcaaattttttt

SEQ ID NO: 175000 - DNA, 15 bp, Homo sapiens
aagcaaattttttta

SEQ ID NO: 175001 - DNA, 15 bp, Homo sapiens
agcaaatttttttaa

SEQ ID NO: 175002 - DNA, 15 bp, Homo sapiens
gcaaatttttttaaa

SEQ ID NO: 175003 - DNA, 15 bp, Homo sapiens
caaatttttttaaaa

SEQ ID NO: 175004 - DNA, 15 bp, Homo sapiens
aaatttttttaaaat

SEQ ID NO: 175005 - DNA, 15 bp, Homo sapiens
aatttttttaaaatc

SEQ ID NO: 175006 - DNA, 15 bp, Homo sapiens
atttttttaaaatct

SEQ ID NO: 175007 - DNA, 15 bp, Homo sapiens
tttttttaaaatctc

SEQ ID NO: 175008 - DNA, 15 bp, Homo sapiens
ttttttaaaatctca

SEQ ID NO: 175009 - DNA, 15 bp, Homo sapiens
tttttaaaatctcag

SEQ ID NO: 175010 - DNA, 15 bp, Homo sapiens
ttttaaaatctcagg

SEQ ID NO: 175011 - DNA, 15 bp, Homo sapiens
tttaaaatctcagga

SEQ ID NO: 175012 - DNA, 15 bp, Homo sapiens
ttaaaatctcaggaa

SEQ ID NO: 175013 - DNA, 15 bp, Homo sapiens
taaaatctcaggaac

SEQ ID NO: 175014 - DNA, 15 bp, Homo sapiens
aaaatctcaggaact

SEQ ID NO: 175015 - DNA, 15 bp, Homo sapiens
aaatctcaggaacta

SEQ ID NO: 175016 - DNA, 15 bp, Homo sapiens
aatctcaggaactat

SEQ ID NO: 175017 - DNA, 15 bp, Homo sapiens
atctcaggaactata

SEQ ID NO: 175018 - DNA, 15 bp, Homo sapiens
tctcaggaactatag

SEQ ID NO: 175019 - DNA, 15 bp, Homo sapiens
ctcaggaactataga

SEQ ID NO: 175020 - DNA, 15 bp, Homo sapiens
tcaggaactatagac

SEQ ID NO: 175021 - DNA, 15 bp, Homo sapiens
caggaactatagaca

SEQ ID NO: 175022 - DNA, 15 bp, Homo sapiens
aggaactatagacat

SEQ ID NO: 175023 - DNA, 15 bp, Homo sapiens
ggaactatagacatg

SEQ ID NO: 175024 - DNA, 15 bp, Homo sapiens
gaactatagacatga

SEQ ID NO: 175025 - DNA, 15 bp, Homo sapiens
aactatagacatgat

SEQ ID NO: 175026 - DNA, 15 bp, Homo sapiens
actatagacatgatg

SEQ ID NO: 175027 - DNA, 15 bp, Homo sapiens
ctatagacatgatga

SEQ ID NO: 175028 - DNA, 15 bp, Homo sapiens
tatagacatgatgaa

SEQ ID NO: 175029 - DNA, 15 bp, Homo sapiens
atagacatgatgaaa

SEQ ID NO: 175030 - DNA, 15 bp, Homo sapiens
tagacatgatgaaaa

SEQ ID NO: 175031 - DNA, 15 bp, Homo sapiens
agacatgatgaaaag

SEQ ID NO: 175032 - DNA, 15 bp, Homo sapiens
gacatgatgaaaaga

SEQ ID NO: 175033 - DNA, 15 bp, Homo sapiens
acatgatgaaaagat

SEQ ID NO: 175034 - DNA, 15 bp, Homo sapiens
catgatgaaaagata

SEQ ID NO: 175035 - DNA, 15 bp, Homo sapiens
atgatgaaaagatag

SEQ ID NO: 175036 - DNA, 15 bp, Homo sapiens
tgatgaaaagataga

SEQ ID NO: 175037 - DNA, 15 bp, Homo sapiens
gatgaaaagatagat

SEQ ID NO: 175038 - DNA, 15 bp, Homo sapiens
atgaaaagatagata

SEQ ID NO: 175039 - DNA, 15 bp, Homo sapiens
tgaaaagatagatat

SEQ ID NO: 175040 - DNA, 15 bp, Homo sapiens
gaaaagatagatatt

SEQ ID NO: 175041 - DNA, 15 bp, Homo sapiens
aaaagatagatattt

SEQ ID NO: 175042 - DNA, 15 bp, Homo sapiens
aaagatagatatttt

SEQ ID NO: 175043 - DNA, 15 bp, Homo sapiens
aagatagatatttta

SEQ ID NO: 175044 - DNA, 15 bp, Homo sapiens
agatagatattttat

SEQ ID NO: 175045 - DNA, 15 bp, Homo sapiens
gatagatattttata

SEQ ID NO: 175046 - DNA, 15 bp, Homo sapiens
atagatattttatat

SEQ ID NO: 175047 - DNA, 15 bp, Homo sapiens
tagatattttatata

SEQ ID NO: 175048 - DNA, 15 bp, Homo sapiens
agatattttatataa

SEQ ID NO: 175049 - DNA, 15 bp, Homo sapiens
gatattttatataaa

SEQ ID NO: 175050 - DNA, 15 bp, Homo sapiens
atattttatataaat

SEQ ID NO: 175051 - DNA, 15 bp, Homo sapiens
tattttatataaata

SEQ ID NO: 175052 - DNA, 15 bp, Homo sapiens
attttatataaataa

SEQ ID NO: 175053 - DNA, 15 bp, Homo sapiens
ttttatataaataat

SEQ ID NO: 175054 - DNA, 15 bp, Homo sapiens
tttatataaataatt

SEQ ID NO: 175055 - DNA, 15 bp, Homo sapiens
ttatataaataattc

SEQ ID NO: 175056 - DNA, 15 bp, Homo sapiens
tatataaataattca

SEQ ID NO: 175057 - DNA, 15 bp, Homo sapiens
atataaataattcaa

SEQ ID NO: 175058 - DNA, 15 bp, Homo sapiens
tataaataattcaaa

SEQ ID NO: 175059 - DNA, 15 bp, Homo sapiens
ataaataattcaaaa

SEQ ID NO: 175060 - DNA, 15 bp, Homo sapiens
taaataattcaaaaa

SEQ ID NO: 175061 - DNA, 15 bp, Homo sapiens
aaataattcaaaaat

SEQ ID NO: 175062 - DNA, 15 bp, Homo sapiens
aataattcaaaaata

SEQ ID NO: 175063 - DNA, 15 bp, Homo sapiens
ataattcaaaaatac

SEQ ID NO: 175064 - DNA, 15 bp, Homo sapiens
taattcaaaaatact

SEQ ID NO: 175065 - DNA, 15 bp, Homo sapiens
aattcaaaaatactg

SEQ ID NO: 175066 - DNA, 15 bp, Homo sapiens
attcaaaaatactgt

SEQ ID NO: 175067 - DNA, 15 bp, Homo sapiens
ttcaaaaatactgtc

SEQ ID NO: 175068 - DNA, 15 bp, Homo sapiens
tcaaaaatactgtca

SEQ ID NO: 175069 - DNA, 15 bp, Homo sapiens
caaaaatactgtcag

SEQ ID NO: 175070 - DNA, 15 bp, Homo sapiens
aaaaatactgtcagg

SEQ ID NO: 175071 - DNA, 15 bp, Homo sapiens
aaaatactgtcaggc

SEQ ID NO: 175072 - DNA, 15 bp, Homo sapiens
aaatactgtcaggca

SEQ ID NO: 175073 - DNA, 15 bp, Homo sapiens
aatactgtcaggcaa

SEQ ID NO: 175074 - DNA, 15 bp, Homo sapiens
atactgtcaggcaag

SEQ ID NO: 175075 - DNA, 15 bp, Homo sapiens
tactgtcaggcaagg

SEQ ID NO: 175076 - DNA, 15 bp, Homo sapiens
actgtcaggcaagga

SEQ ID NO: 175077 - DNA, 15 bp, Homo sapiens
ctgtcaggcaaggaa

SEQ ID NO: 175078 - DNA, 15 bp, Homo sapiens
tgtcaggcaaggaaa

SEQ ID NO: 175079 - DNA, 15 bp, Homo sapiens
gtcaggcaaggaaat

SEQ ID NO: 175080 - DNA, 15 bp, Homo sapiens
tcaggcaaggaaatg

SEQ ID NO: 175081 - DNA, 15 bp, Homo sapiens
caggcaaggaaatgt

SEQ ID NO: 175082 - DNA, 15 bp, Homo sapiens
aggcaaggaaatgta

SEQ ID NO: 175083 - DNA, 15 bp, Homo sapiens
ggcaaggaaatgtaa

SEQ ID NO: 175084 - DNA, 15 bp, Homo sapiens
gcaaggaaatgtaaa

SEQ ID NO: 175085 - DNA, 15 bp, Homo sapiens
caaggaaatgtaaaa

SEQ ID NO: 175086 - DNA, 15 bp, Homo sapiens
aaggaaatgtaaaat

SEQ ID NO: 175087 - DNA, 15 bp, Homo sapiens
aggaaatgtaaaatc

SEQ ID NO: 175088 - DNA, 15 bp, Homo sapiens
ggaaatgtaaaatcc

SEQ ID NO: 175089 - DNA, 15 bp, Homo sapiens
gaaatgtaaaatcct

SEQ ID NO: 175090 - DNA, 15 bp, Homo sapiens
aaatgtaaaatcctt

SEQ ID NO: 175091 - DNA, 15 bp, Homo sapiens
aatgtaaaatcctta

SEQ ID NO: 175092 - DNA, 15 bp, Homo sapiens
atgtaaaatccttat

SEQ ID NO: 175093 - DNA, 15 bp, Homo sapiens
tgtaaaatccttatt

SEQ ID NO: 175094 - DNA, 15 bp, Homo sapiens
gtaaaatccttattt

SEQ ID NO: 175095 - DNA, 15 bp, Homo sapiens
taaaatccttatttg

SEQ ID NO: 175096 - DNA, 15 bp, Homo sapiens
aaaatccttatttga

SEQ ID NO: 175097 - DNA, 15 bp, Homo sapiens
aaatccttatttgag

SEQ ID NO: 175098 - DNA, 15 bp, Homo sapiens
aatccttatttgagt

SEQ ID NO: 175099 - DNA, 15 bp, Homo sapiens
atccttatttgagta

SEQ ID NO: 175100 - DNA, 15 bp, Homo sapiens
tccttatttgagtaa

SEQ ID NO: 175101 - DNA, 15 bp, Homo sapiens
ccttatttgagtaaa

SEQ ID NO: 175102 - DNA, 15 bp, Homo sapiens
cttatttgagtaaaa

SEQ ID NO: 175103 - DNA, 15 bp, Homo sapiens
ttatttgagtaaaag

SEQ ID NO: 175104 - DNA, 15 bp, Homo sapiens
tatttgagtaaaaga

SEQ ID NO: 175105 - DNA, 15 bp, Homo sapiens
atttgagtaaaagaa

SEQ ID NO: 175106 - DNA, 15 bp, Homo sapiens
tttgagtaaaagaaa

SEQ ID NO: 175107 - DNA, 15 bp, Homo sapiens
ttgagtaaaagaaaa

SEQ ID NO: 175108 - DNA, 15 bp, Homo sapiens
tgagtaaaagaaaat

SEQ ID NO: 175109 - DNA, 15 bp, Homo sapiens
gagtaaaagaaaatg

SEQ ID NO: 175110 - DNA, 15 bp, Homo sapiens
agtaaaagaaaatgc

SEQ ID NO: 175111 - DNA, 15 bp, Homo sapiens
gtaaaagaaaatgct

SEQ ID NO: 175112 - DNA, 15 bp, Homo sapiens
taaaagaaaatgcta

SEQ ID NO: 175113 - DNA, 15 bp, Homo sapiens
aaaagaaaatgctat

SEQ ID NO: 175114 - DNA, 15 bp, Homo sapiens
aaagaaaatgctata

SEQ ID NO: 175115 - DNA, 15 bp, Homo sapiens
aagaaaatgctataa

SEQ ID NO: 175116 - DNA, 15 bp, Homo sapiens
agaaaatgctataaa

SEQ ID NO: 175117 - DNA, 15 bp, Homo sapiens
gaaaatgctataaag

SEQ ID NO: 175118 - DNA, 15 bp, Homo sapiens
aaaatgctataaagc

SEQ ID NO: 175119 - DNA, 15 bp, Homo sapiens
aaatgctataaagca

SEQ ID NO: 175120 - DNA, 15 bp, Homo sapiens
aatgctataaagcaa

SEQ ID NO: 175121 - DNA, 15 bp, Homo sapiens
atgctataaagcaat

SEQ ID NO: 175122 - DNA, 15 bp, Homo sapiens
tgctataaagcaatg

SEQ ID NO: 175123 - DNA, 15 bp, Homo sapiens
gctataaagcaatga

SEQ ID NO: 175124 - DNA, 15 bp, Homo sapiens
ctataaagcaatgag

SEQ ID NO: 175125 - DNA, 15 bp, Homo sapiens
tataaagcaatgagt

SEQ ID NO: 175126 - DNA, 15 bp, Homo sapiens
ataaagcaatgagtt

SEQ ID NO: 175127 - DNA, 15 bp, Homo sapiens
taaagcaatgagtta

SEQ ID NO: 175128 - DNA, 15 bp, Homo sapiens
aaagcaatgagttat

SEQ ID NO: 175129 - DNA, 15 bp, Homo sapiens
aagcaatgagttatc

SEQ ID NO: 175130 - DNA, 15 bp, Homo sapiens
agcaatgagttatca

SEQ ID NO: 175131 - DNA, 15 bp, Homo sapiens
gcaatgagttatcaa

SEQ ID NO: 175132 - DNA, 15 bp, Homo sapiens
caatgagttatcaaa

SEQ ID NO: 175133 - DNA, 15 bp, Homo sapiens
aatgagttatcaaaa

SEQ ID NO: 175134 - DNA, 15 bp, Homo sapiens
atgagttatcaaaat

SEQ ID NO: 175135 - DNA, 15 bp, Homo sapiens
tgagttatcaaaata

SEQ ID NO: 175136 - DNA, 15 bp, Homo sapiens
gagttatcaaaatac

SEQ ID NO: 175137 - DNA, 15 bp, Homo sapiens
agttatcaaaataca

SEQ ID NO: 175138 - DNA, 15 bp, Homo sapiens
gttatcaaaatacag

SEQ ID NO: 175139 - DNA, 15 bp, Homo sapiens
ttatcaaaatacaga

SEQ ID NO: 175140 - DNA, 15 bp, Homo sapiens
tatcaaaatacagaa

SEQ ID NO: 175141 - DNA, 15 bp, Homo sapiens
atcaaaatacagaag

SEQ ID NO: 175142 - DNA, 15 bp, Homo sapiens
tcaaaatacagaaga

SEQ ID NO: 175143 - DNA, 15 bp, Homo sapiens
caaaatacagaagag

SEQ ID NO: 175144 - DNA, 15 bp, Homo sapiens
aaaatacagaagagg

SEQ ID NO: 175145 - DNA, 15 bp, Homo sapiens
aaatacagaagaggt

SEQ ID NO: 175146 - DNA, 15 bp, Homo sapiens
aatacagaagaggta

SEQ ID NO: 175147 - DNA, 15 bp, Homo sapiens
atacagaagaggtat

SEQ ID NO: 175148 - DNA, 15 bp, Homo sapiens
tacagaagaggtatt

SEQ ID NO: 175149 - DNA, 15 bp, Homo sapiens
acagaagaggtattc

SEQ ID NO: 175150 - DNA, 15 bp, Homo sapiens
cagaagaggtattct

SEQ ID NO: 175151 - DNA, 15 bp, Homo sapiens
agaagaggtattcta

SEQ ID NO: 175152 - DNA, 15 bp, Homo sapiens
gaagaggtattctaa

SEQ ID NO: 175153 - DNA, 15 bp, Homo sapiens
aagaggtattctaaa

SEQ ID NO: 175154 - DNA, 15 bp, Homo sapiens
agaggtattctaaaa

SEQ ID NO: 175155 - DNA, 15 bp, Homo sapiens
gaggtattctaaaac

SEQ ID NO: 175156 - DNA, 15 bp, Homo sapiens
aggtattctaaaaca

SEQ ID NO: 175157 - DNA, 15 bp, Homo sapiens
ggtattctaaaacaa

SEQ ID NO: 175158 - DNA, 15 bp, Homo sapiens
gtattctaaaacaaa

SEQ ID NO: 175159 - DNA, 15 bp, Homo sapiens
tattctaaaacaaat

SEQ ID NO: 175160 - DNA, 15 bp, Homo sapiens
attctaaaacaaatg

SEQ ID NO: 175161 - DNA, 15 bp, Homo sapiens
ttctaaaacaaatga

SEQ ID NO: 175162 - DNA, 15 bp, Homo sapiens
tctaaaacaaatgaa

SEQ ID NO: 175163 - DNA, 15 bp, Homo sapiens
ctaaaacaaatgaaa

SEQ ID NO: 175164 - DNA, 15 bp, Homo sapiens
taaaacaaatgaaaa

SEQ ID NO: 175165 - DNA, 15 bp, Homo sapiens
aaaacaaatgaaaaa

SEQ ID NO: 175166 - DNA, 15 bp, Homo sapiens
aaacaaatgaaaaac

SEQ ID NO: 175167 - DNA, 15 bp, Homo sapiens
aacaaatgaaaaacc

SEQ ID NO: 175168 - DNA, 15 bp, Homo sapiens
acaaatgaaaaacca

SEQ ID NO: 175169 - DNA, 15 bp, Homo sapiens
caaatgaaaaaccaa

SEQ ID NO: 175170 - DNA, 15 bp, Homo sapiens
aaatgaaaaaccaag

SEQ ID NO: 175171 - DNA, 15 bp, Homo sapiens
aatgaaaaaccaaga

SEQ ID NO: 175172 - DNA, 15 bp, Homo sapiens
atgaaaaaccaagat

SEQ ID NO: 175173 - DNA, 15 bp, Homo sapiens
tgaaaaaccaagatg

SEQ ID NO: 175174 - DNA, 15 bp, Homo sapiens
gaaaaaccaagatga

SEQ ID NO: 175175 - DNA, 15 bp, Homo sapiens
aaaaaccaagatgat

SEQ ID NO: 175176 - DNA, 15 bp, Homo sapiens
aaaaccaagatgatg

SEQ ID NO: 175177 - DNA, 15 bp, Homo sapiens
aaaccaagatgatga

SEQ ID NO: 175178 - DNA, 15 bp, Homo sapiens
aaccaagatgatgaa

SEQ ID NO: 175179 - DNA, 15 bp, Homo sapiens
accaagatgatgaaa

SEQ ID NO: 175180 - DNA, 15 bp, Homo sapiens
ccaagatgatgaaat

SEQ ID NO: 175181 - DNA, 15 bp, Homo sapiens
caagatgatgaaata

SEQ ID NO: 175182 - DNA, 15 bp, Homo sapiens
aagatgatgaaatag

SEQ ID NO: 175183 - DNA, 15 bp, Homo sapiens
agatgatgaaatagt

SEQ ID NO: 175184 - DNA, 15 bp, Homo sapiens
gatgatgaaatagtg

SEQ ID NO: 175185 - DNA, 15 bp, Homo sapiens
atgatgaaatagtga

SEQ ID NO: 175186 - DNA, 15 bp, Homo sapiens
tgatgaaatagtgac

SEQ ID NO: 175187 - DNA, 15 bp, Homo sapiens
gatgaaatagtgaca

SEQ ID NO: 175188 - DNA, 15 bp, Homo sapiens
atgaaatagtgacaa

SEQ ID NO: 175189 - DNA, 15 bp, Homo sapiens
tgaaatagtgacaac

SEQ ID NO: 175190 - DNA, 15 bp, Homo sapiens
gaaatagtgacaact

SEQ ID NO: 175191 - DNA, 15 bp, Homo sapiens
aaatagtgacaacta

SEQ ID NO: 175192 - DNA, 15 bp, Homo sapiens
aatagtgacaactac

SEQ ID NO: 175193 - DNA, 15 bp, Homo sapiens
atagtgacaactact

SEQ ID NO: 175194 - DNA, 15 bp, Homo sapiens
tagtgacaactactt

SEQ ID NO: 175195 - DNA, 15 bp, Homo sapiens
agtgacaactacttc

SEQ ID NO: 175196 - DNA, 15 bp, Homo sapiens
gtgacaactacttct

SEQ ID NO: 175197 - DNA, 15 bp, Homo sapiens
tgacaactacttcta

SEQ ID NO: 175198 - DNA, 15 bp, Homo sapiens
gacaactacttctaa

SEQ ID NO: 175199 - DNA, 15 bp, Homo sapiens
acaactacttctaat

SEQ ID NO: 175200 - DNA, 15 bp, Homo sapiens
caactacttctaatg

SEQ ID NO: 175201 - DNA, 15 bp, Homo sapiens
aactacttctaatgt

SEQ ID NO: 175202 - DNA, 15 bp, Homo sapiens
actacttctaatgtg

SEQ ID NO: 175203 - DNA, 15 bp, Homo sapiens
ctacttctaatgtgt

SEQ ID NO: 175204 - DNA, 15 bp, Homo sapiens
tacttctaatgtgta

SEQ ID NO: 175205 - DNA, 15 bp, Homo sapiens
acttctaatgtgtaa

SEQ ID NO: 175206 - DNA, 15 bp, Homo sapiens
cttctaatgtgtaac

SEQ ID NO: 175207 - DNA, 15 bp, Homo sapiens
ttctaatgtgtaaca

SEQ ID NO: 175208 - DNA, 15 bp, Homo sapiens
tctaatgtgtaacag

SEQ ID NO: 175209 - DNA, 15 bp, Homo sapiens
ctaatgtgtaacaga

SEQ ID NO: 175210 - DNA, 15 bp, Homo sapiens
taatgtgtaacagat

SEQ ID NO: 175211 - DNA, 15 bp, Homo sapiens
aatgtgtaacagata

SEQ ID NO: 175212 - DNA, 15 bp, Homo sapiens
atgtgtaacagatac

SEQ ID NO: 175213 - DNA, 15 bp, Homo sapiens
tgtgtaacagatact

SEQ ID NO: 175214 - DNA, 15 bp, Homo sapiens
gtgtaacagatactg

SEQ ID NO: 175215 - DNA, 15 bp, Homo sapiens
tgtaacagatactga

SEQ ID NO: 175216 - DNA, 15 bp, Homo sapiens
gtaacagatactgaa

SEQ ID NO: 175217 - DNA, 15 bp, Homo sapiens
taacagatactgaaa

SEQ ID NO: 175218 - DNA, 15 bp, Homo sapiens
aacagatactgaaat

SEQ ID NO: 175219 - DNA, 15 bp, Homo sapiens
acagatactgaaatg

SEQ ID NO: 175220 - DNA, 15 bp, Homo sapiens
cagatactgaaatgc

SEQ ID NO: 175221 - DNA, 15 bp, Homo sapiens
agatactgaaatgcc

SEQ ID NO: 175222 - DNA, 15 bp, Homo sapiens
gatactgaaatgcca

SEQ ID NO: 175223 - DNA, 15 bp, Homo sapiens
atactgaaatgccaa

SEQ ID NO: 175224 - DNA, 15 bp, Homo sapiens
tactgaaatgccaag

SEQ ID NO: 175225 - DNA, 15 bp, Homo sapiens
actgaaatgccaagg

SEQ ID NO: 175226 - DNA, 15 bp, Homo sapiens
ctgaaatgccaaggt

SEQ ID NO: 175227 - DNA, 15 bp, Homo sapiens
tgaaatgccaaggtg

SEQ ID NO: 175228 - DNA, 15 bp, Homo sapiens
gaaatgccaaggtga

SEQ ID NO: 175229 - DNA, 15 bp, Homo sapiens
aaatgccaaggtgaa

SEQ ID NO: 175230 - DNA, 15 bp, Homo sapiens
aatgccaaggtgaaa

SEQ ID NO: 175231 - DNA, 15 bp, Homo sapiens
atgccaaggtgaaag

SEQ ID NO: 175232 - DNA, 15 bp, Homo sapiens
tgccaaggtgaaagt

SEQ ID NO: 175233 - DNA, 15 bp, Homo sapiens
gccaaggtgaaagtg

SEQ ID NO: 175234 - DNA, 15 bp, Homo sapiens
ccaaggtgaaagtga

SEQ ID NO: 175235 - DNA, 15 bp, Homo sapiens
caaggtgaaagtgaa

SEQ ID NO: 175236 - DNA, 15 bp, Homo sapiens
aaggtgaaagtgaac

SEQ ID NO: 175237 - DNA, 15 bp, Homo sapiens
aggtgaaagtgaact

SEQ ID NO: 175238 - DNA, 15 bp, Homo sapiens
ggtgaaagtgaactg

SEQ ID NO: 175239 - DNA, 15 bp, Homo sapiens
gtgaaagtgaactga

SEQ ID NO: 175240 - DNA, 15 bp, Homo sapiens
tgaaagtgaactgaa

SEQ ID NO: 175241 - DNA, 15 bp, Homo sapiens
gaaagtgaactgaat

SEQ ID NO: 175242 - DNA, 15 bp, Homo sapiens
aaagtgaactgaatt

SEQ ID NO: 175243 - DNA, 15 bp, Homo sapiens
aagtgaactgaatta

SEQ ID NO: 175244 - DNA, 15 bp, Homo sapiens
agtgaactgaattat

SEQ ID NO: 175245 - DNA, 15 bp, Homo sapiens
gtgaactgaattatt

SEQ ID NO: 175246 - DNA, 15 bp, Homo sapiens
tgaactgaattattt

SEQ ID NO: 175247 - DNA, 15 bp, Homo sapiens
gaactgaattatttc

SEQ ID NO: 175248 - DNA, 15 bp, Homo sapiens
aactgaattatttct

SEQ ID NO: 175249 - DNA, 15 bp, Homo sapiens
actgaattatttctt

SEQ ID NO: 175250 - DNA, 15 bp, Homo sapiens
ctgaattatttctta

SEQ ID NO: 175251 - DNA, 15 bp, Homo sapiens
tgaattatttcttaa

SEQ ID NO: 175252 - DNA, 15 bp, Homo sapiens
gaattatttcttaaa

SEQ ID NO: 175253 - DNA, 15 bp, Homo sapiens
aattatttcttaaag

SEQ ID NO: 175254 - DNA, 15 bp, Homo sapiens
attatttcttaaagc

SEQ ID NO: 175255 - DNA, 15 bp, Homo sapiens
ttatttcttaaagca

SEQ ID NO: 175256 - DNA, 15 bp, Homo sapiens
tatttcttaaagcag

SEQ ID NO: 175257 - DNA, 15 bp, Homo sapiens
atttcttaaagcagt

SEQ ID NO: 175258 - DNA, 15 bp, Homo sapiens
tttcttaaagcagtg

SEQ ID NO: 175259 - DNA, 15 bp, Homo sapiens
ttcttaaagcagtgg

SEQ ID NO: 175260 - DNA, 15 bp, Homo sapiens
tcttaaagcagtgga

SEQ ID NO: 175261 - DNA, 15 bp, Homo sapiens
cttaaagcagtggag

SEQ ID NO: 175262 - DNA, 15 bp, Homo sapiens
ttaaagcagtggaga

SEQ ID NO: 175263 - DNA, 15 bp, Homo sapiens
taaagcagtggagaa

SEQ ID NO: 175264 - DNA, 15 bp, Homo sapiens
aaagcagtggagaat

SEQ ID NO: 175265 - DNA, 15 bp, Homo sapiens
aagcagtggagaata

SEQ ID NO: 175266 - DNA, 15 bp, Homo sapiens
agcagtggagaatat

SEQ ID NO: 175267 - DNA, 15 bp, Homo sapiens
gcagtggagaatatg

SEQ ID NO: 175268 - DNA, 15 bp, Homo sapiens
cagtggagaatatgt

SEQ ID NO: 175269 - DNA, 15 bp, Homo sapiens
agtggagaatatgta

SEQ ID NO: 175270 - DNA, 15 bp, Homo sapiens
gtggagaatatgtaa

SEQ ID NO: 175271 - DNA, 15 bp, Homo sapiens
tggagaatatgtaac

SEQ ID NO: 175272 - DNA, 15 bp, Homo sapiens
ggagaatatgtaact

SEQ ID NO: 175273 - DNA, 15 bp, Homo sapiens
gagaatatgtaactt

SEQ ID NO: 175274 - DNA, 15 bp, Homo sapiens
agaatatgtaacttt

SEQ ID NO: 175275 - DNA, 15 bp, Homo sapiens
gaatatgtaactttc

SEQ ID NO: 175276 - DNA, 15 bp, Homo sapiens
aatatgtaactttca

SEQ ID NO: 175277 - DNA, 15 bp, Homo sapiens
atatgtaactttcaa

SEQ ID NO: 175278 - DNA, 15 bp, Homo sapiens
tatgtaactttcaaa

SEQ ID NO: 175279 - DNA, 15 bp, Homo sapiens
atgtaactttcaaaa

SEQ ID NO: 175280 - DNA, 15 bp, Homo sapiens
tgtaactttcaaaaa

SEQ ID NO: 175281 - DNA, 15 bp, Homo sapiens
gtaactttcaaaaat

SEQ ID NO: 175282 - DNA, 15 bp, Homo sapiens
taactttcaaaaatg

SEQ ID NO: 175283 - DNA, 15 bp, Homo sapiens
aactttcaaaaatgc

SEQ ID NO: 175284 - DNA, 15 bp, Homo sapiens
actttcaaaaatgca

SEQ ID NO: 175285 - DNA, 15 bp, Homo sapiens
ctttcaaaaatgcaa

SEQ ID NO: 175286 - DNA, 15 bp, Homo sapiens
tttcaaaaatgcaag

SEQ ID NO: 175287 - DNA, 15 bp, Homo sapiens
ttcaaaaatgcaaga

SEQ ID NO: 175288 - DNA, 15 bp, Homo sapiens
tcaaaaatgcaagaa

SEQ ID NO: 175289 - DNA, 15 bp, Homo sapiens
caaaaatgcaagaag

SEQ ID NO: 175290 - DNA, 15 bp, Homo sapiens
aaaaatgcaagaagc

SEQ ID NO: 175291 - DNA, 15 bp, Homo sapiens
aaaatgcaagaagca

SEQ ID NO: 175292 - DNA, 15 bp, Homo sapiens
aaatgcaagaagcac

SEQ ID NO: 175293 - DNA, 15 bp, Homo sapiens
aatgcaagaagcaca

SEQ ID NO: 175294 - DNA, 15 bp, Homo sapiens
atgcaagaagcacag

SEQ ID NO: 175295 - DNA, 15 bp, Homo sapiens
tgcaagaagcacagc

SEQ ID NO: 175296 - DNA, 15 bp, Homo sapiens
gcaagaagcacagca

SEQ ID NO: 175297 - DNA, 15 bp, Homo sapiens
caagaagcacagcaa

SEQ ID NO: 175298 - DNA, 15 bp, Homo sapiens
aagaagcacagcaaa

SEQ ID NO: 175299 - DNA, 15 bp, Homo sapiens
agaagcacagcaaat

SEQ ID NO: 175300 - DNA, 15 bp, Homo sapiens
gaagcacagcaaatt

SEQ ID NO: 175301 - DNA, 15 bp, Homo sapiens
aagcacagcaaatta

SEQ ID NO: 175302 - DNA, 15 bp, Homo sapiens
agcacagcaaattaa

SEQ ID NO: 175303 - DNA, 15 bp, Homo sapiens
gcacagcaaattaac

SEQ ID NO: 175304 - DNA, 15 bp, Homo sapiens
cacagcaaattaact

SEQ ID NO: 175305 - DNA, 15 bp, Homo sapiens
acagcaaattaacta

SEQ ID NO: 175306 - DNA, 15 bp, Homo sapiens
cagcaaattaactaa

SEQ ID NO: 175307 - DNA, 15 bp, Homo sapiens
agcaaattaactaat

SEQ ID NO: 175308 - DNA, 15 bp, Homo sapiens
gcaaattaactaatt

SEQ ID NO: 175309 - DNA, 15 bp, Homo sapiens
caaattaactaatta

SEQ ID NO: 175310 - DNA, 15 bp, Homo sapiens
aaattaactaattaa

SEQ ID NO: 175311 - DNA, 15 bp, Homo sapiens
aattaactaattaac

SEQ ID NO: 175312 - DNA, 15 bp, Homo sapiens
attaactaattaact

SEQ ID NO: 175313 - DNA, 15 bp, Homo sapiens
ttaactaattaactt

SEQ ID NO: 175314 - DNA, 15 bp, Homo sapiens
taactaattaactta

SEQ ID NO: 175315 - DNA, 15 bp, Homo sapiens
aactaattaacttac

SEQ ID NO: 175316 - DNA, 15 bp, Homo sapiens
actaattaacttacc

SEQ ID NO: 175317 - DNA, 15 bp, Homo sapiens
ctaattaacttacca

SEQ ID NO: 175318 - DNA, 15 bp, Homo sapiens
taattaacttaccac

SEQ ID NO: 175319 - DNA, 15 bp, Homo sapiens
aattaacttaccacc

SEQ ID NO: 175320 - DNA, 15 bp, Homo sapiens
attaacttaccacct

SEQ ID NO: 175321 - DNA, 15 bp, Homo sapiens
ttaacttaccacctc

SEQ ID NO: 175322 - DNA, 15 bp, Homo sapiens
taacttaccacctcc

SEQ ID NO: 175323 - DNA, 15 bp, Homo sapiens
aacttaccacctcct

SEQ ID NO: 175324 - DNA, 15 bp, Homo sapiens
acttaccacctcctt

SEQ ID NO: 175325 - DNA, 15 bp, Homo sapiens
cttaccacctccttc

SEQ ID NO: 175326 - DNA, 15 bp, Homo sapiens
ttaccacctccttca

SEQ ID NO: 175327 - DNA, 15 bp, Homo sapiens
taccacctccttcaa

SEQ ID NO: 175328 - DNA, 15 bp, Homo sapiens
accacctccttcaaa

SEQ ID NO: 175329 - DNA, 15 bp, Homo sapiens
ccacctccttcaaat

SEQ ID NO: 175330 - DNA, 15 bp, Homo sapiens
cacctccttcaaata

SEQ ID NO: 175331 - DNA, 15 bp, Homo sapiens
acctccttcaaataa

SEQ ID NO: 175332 - DNA, 15 bp, Homo sapiens
cctccttcaaataaa

SEQ ID NO: 175333 - DNA, 15 bp, Homo sapiens
ctccttcaaataaaa

SEQ ID NO: 175334 - DNA, 15 bp, Homo sapiens
tccttcaaataaaag

SEQ ID NO: 175335 - DNA, 15 bp, Homo sapiens
ccttcaaataaaagc

SEQ ID NO: 175336 - DNA, 15 bp, Homo sapiens
cttcaaataaaagcg

SEQ ID NO: 175337 - DNA, 15 bp, Homo sapiens
ttcaaataaaagcga

SEQ ID NO: 175338 - DNA, 15 bp, Homo sapiens
tcaaataaaagcgag

SEQ ID NO: 175339 - DNA, 15 bp, Homo sapiens
caaataaaagcgaga

SEQ ID NO: 175340 - DNA, 15 bp, Homo sapiens
aaataaaagcgagaa

SEQ ID NO: 175341 - DNA, 15 bp, Homo sapiens
aataaaagcgagaac

SEQ ID NO: 175342 - DNA, 15 bp, Homo sapiens
ataaaagcgagaacc

SEQ ID NO: 175343 - DNA, 15 bp, Homo sapiens
taaaagcgagaacct

SEQ ID NO: 175344 - DNA, 15 bp, Homo sapiens
aaaagcgagaacctc

SEQ ID NO: 175345 - DNA, 15 bp, Homo sapiens
aaagcgagaacctct

SEQ ID NO: 175346 - DNA, 15 bp, Homo sapiens
aagcgagaacctctt

SEQ ID NO: 175347 - DNA, 15 bp, Homo sapiens
agcgagaacctcttg

SEQ ID NO: 175348 - DNA, 15 bp, Homo sapiens
gcgagaacctcttgg

SEQ ID NO: 175349 - DNA, 15 bp, Homo sapiens
cgagaacctcttggg

SEQ ID NO: 175350 - DNA, 15 bp, Homo sapiens
gagaacctcttggga

SEQ ID NO: 175351 - DNA, 15 bp, Homo sapiens
agaacctcttgggag

SEQ ID NO: 175352 - DNA, 15 bp, Homo sapiens
gaacctcttgggaga

SEQ ID NO: 175353 - DNA, 15 bp, Homo sapiens
aacctcttgggagaa

SEQ ID NO: 175354 - DNA, 15 bp, Homo sapiens
acctcttgggagaat

SEQ ID NO: 175355 - DNA, 15 bp, Homo sapiens
cctcttgggagaatt

SEQ ID NO: 175356 - DNA, 15 bp, Homo sapiens
ctcttgggagaattt

SEQ ID NO: 175357 - DNA, 15 bp, Homo sapiens
tcttgggagaattta

SEQ ID NO: 175358 - DNA, 15 bp, Homo sapiens
cttgggagaatttaa

SEQ ID NO: 175359 - DNA, 15 bp, Homo sapiens
ttgggagaatttaag

SEQ ID NO: 175360 - DNA, 15 bp, Homo sapiens
tgggagaatttaagc

SEQ ID NO: 175361 - DNA, 15 bp, Homo sapiens
gggagaatttaagca

SEQ ID NO: 175362 - DNA, 15 bp, Homo sapiens
ggagaatttaagcac

SEQ ID NO: 175363 - DNA, 15 bp, Homo sapiens
gagaatttaagcacc

SEQ ID NO: 175364 - DNA, 15 bp, Homo sapiens
agaatttaagcacca

SEQ ID NO: 175365 - DNA, 15 bp, Homo sapiens
gaatttaagcaccat

SEQ ID NO: 175366 - DNA, 15 bp, Homo sapiens
aatttaagcaccatt

SEQ ID NO: 175367 - DNA, 15 bp, Homo sapiens
atttaagcaccatta

SEQ ID NO: 175368 - DNA, 15 bp, Homo sapiens
tttaagcaccattag

SEQ ID NO: 175369 - DNA, 15 bp, Homo sapiens
ttaagcaccattagc

SEQ ID NO: 175370 - DNA, 15 bp, Homo sapiens
taagcaccattagca

SEQ ID NO: 175371 - DNA, 15 bp, Homo sapiens
aagcaccattagcag

SEQ ID NO: 175372 - DNA, 15 bp, Homo sapiens
agcaccattagcaga

SEQ ID NO: 175373 - DNA, 15 bp, Homo sapiens
gcaccattagcagac

SEQ ID NO: 175374 - DNA, 15 bp, Homo sapiens
caccattagcagaca

SEQ ID NO: 175375 - DNA, 15 bp, Homo sapiens
accattagcagacac

SEQ ID NO: 175376 - DNA, 15 bp, Homo sapiens
ccattagcagacaca

SEQ ID NO: 175377 - DNA, 15 bp, Homo sapiens
cattagcagacacat

SEQ ID NO: 175378 - DNA, 15 bp, Homo sapiens
attagcagacacatc

SEQ ID NO: 175379 - DNA, 15 bp, Homo sapiens
ttagcagacacatct

SEQ ID NO: 175380 - DNA, 15 bp, Homo sapiens
tagcagacacatctt

SEQ ID NO: 175381 - DNA, 15 bp, Homo sapiens
agcagacacatctta

SEQ ID NO: 175382 - DNA, 15 bp, Homo sapiens
gcagacacatcttag

SEQ ID NO: 175383 - DNA, 15 bp, Homo sapiens
cagacacatcttaga

SEQ ID NO: 175384 - DNA, 15 bp, Homo sapiens
agacacatcttagag

SEQ ID NO: 175385 - DNA, 15 bp, Homo sapiens
gacacatcttagagc

SEQ ID NO: 175386 - DNA, 15 bp, Homo sapiens
acacatcttagagca

SEQ ID NO: 175387 - DNA, 15 bp, Homo sapiens
cacatcttagagcag

SEQ ID NO: 175388 - DNA, 15 bp, Homo sapiens
acatcttagagcagt

SEQ ID NO: 175389 - DNA, 15 bp, Homo sapiens
catcttagagcagtt

SEQ ID NO: 175390 - DNA, 15 bp, Homo sapiens
atcttagagcagtta

SEQ ID NO: 175391 - DNA, 15 bp, Homo sapiens
tcttagagcagttaa

SEQ ID NO: 175392 - DNA, 15 bp, Homo sapiens
cttagagcagttaat

SEQ ID NO: 175393 - DNA, 15 bp, Homo sapiens
ttagagcagttaatg

SEQ ID NO: 175394 - DNA, 15 bp, Homo sapiens
tagagcagttaatga

SEQ ID NO: 175395 - DNA, 15 bp, Homo sapiens
agagcagttaatgaa

SEQ ID NO: 175396 - DNA, 15 bp, Homo sapiens
gagcagttaatgaaa

SEQ ID NO: 175397 - DNA, 15 bp, Homo sapiens
agcagttaatgaaat

SEQ ID NO: 175398 - DNA, 15 bp, Homo sapiens
gcagttaatgaaatg

SEQ ID NO: 175399 - DNA, 15 bp, Homo sapiens
cagttaatgaaatgt

SEQ ID NO: 175400 - DNA, 15 bp, Homo sapiens
agttaatgaaatgtt

SEQ ID NO: 175401 - DNA, 15 bp, Homo sapiens
gttaatgaaatgttt

SEQ ID NO: 175402 - DNA, 15 bp, Homo sapiens
ttaatgaaatgtttt

SEQ ID NO: 175403 - DNA, 15 bp, Homo sapiens
taatgaaatgttttg

SEQ ID NO: 175404 - DNA, 15 bp, Homo sapiens
aatgaaatgttttgt

SEQ ID NO: 175405 - DNA, 15 bp, Homo sapiens
atgaaatgttttgta

SEQ ID NO: 175406 - DNA, 15 bp, Homo sapiens
tgaaatgttttgtat

SEQ ID NO: 175407 - DNA, 15 bp, Homo sapiens
gaaatgttttgtatt

SEQ ID NO: 175408 - DNA, 15 bp, Homo sapiens
aaatgttttgtattt

SEQ ID NO: 175409 - DNA, 15 bp, Homo sapiens
aatgttttgtatttc

SEQ ID NO: 175410 - DNA, 15 bp, Homo sapiens
atgttttgtatttca

SEQ ID NO: 175411 - DNA, 15 bp, Homo sapiens
tgttttgtatttcag

SEQ ID NO: 175412 - DNA, 15 bp, Homo sapiens
gttttgtatttcagt

SEQ ID NO: 175413 - DNA, 15 bp, Homo sapiens
ttttgtatttcagta

SEQ ID NO: 175414 - DNA, 15 bp, Homo sapiens
tttgtatttcagtag

SEQ ID NO: 175415 - DNA, 15 bp, Homo sapiens
ttgtatttcagtaga

SEQ ID NO: 175416 - DNA, 15 bp, Homo sapiens
tgtatttcagtagaa

SEQ ID NO: 175417 - DNA, 15 bp, Homo sapiens
gtatttcagtagaaa

SEQ ID NO: 175418 - DNA, 15 bp, Homo sapiens
tatttcagtagaaaa

SEQ ID NO: 175419 - DNA, 15 bp, Homo sapiens
atttcagtagaaaac

SEQ ID NO: 175420 - DNA, 15 bp, Homo sapiens
tttcagtagaaaact

SEQ ID NO: 175421 - DNA, 15 bp, Homo sapiens
ttcagtagaaaacta

SEQ ID NO: 175422 - DNA, 15 bp, Homo sapiens
tcagtagaaaactat

SEQ ID NO: 175423 - DNA, 15 bp, Homo sapiens
cagtagaaaactatt

SEQ ID NO: 175424 - DNA, 15 bp, Homo sapiens
agtagaaaactattt

SEQ ID NO: 175425 - DNA, 15 bp, Homo sapiens
gtagaaaactatttc

SEQ ID NO: 175426 - DNA, 15 bp, Homo sapiens
tagaaaactatttca

SEQ ID NO: 175427 - DNA, 15 bp, Homo sapiens
agaaaactatttcaa

SEQ ID NO: 175428 - DNA, 15 bp, Homo sapiens
gaaaactatttcaat

SEQ ID NO: 175429 - DNA, 15 bp, Homo sapiens
aaaactatttcaatg

SEQ ID NO: 175430 - DNA, 15 bp, Homo sapiens
aaactatttcaatgg

SEQ ID NO: 175431 - DNA, 15 bp, Homo sapiens
aactatttcaatggt

SEQ ID NO: 175432 - DNA, 15 bp, Homo sapiens
actatttcaatggtg

SEQ ID NO: 175433 - DNA, 15 bp, Homo sapiens
ctatttcaatggtga

SEQ ID NO: 175434 - DNA, 15 bp, Homo sapiens
tatttcaatggtgaa

SEQ ID NO: 175435 - DNA, 15 bp, Homo sapiens
atttcaatggtgaaa

SEQ ID NO: 175436 - DNA, 15 bp, Homo sapiens
tttcaatggtgaaaa

SEQ ID NO: 175437 - DNA, 15 bp, Homo sapiens
ttcaatggtgaaaat

SEQ ID NO: 175438 - DNA, 15 bp, Homo sapiens
tcaatggtgaaaatg

SEQ ID NO: 175439 - DNA, 15 bp, Homo sapiens
caatggtgaaaatga

SEQ ID NO: 175440 - DNA, 15 bp, Homo sapiens
aatggtgaaaatgat

SEQ ID NO: 175441 - DNA, 15 bp, Homo sapiens
atggtgaaaatgatg

SEQ ID NO: 175442 - DNA, 15 bp, Homo sapiens
tggtgaaaatgatgc

SEQ ID NO: 175443 - DNA, 15 bp, Homo sapiens
ggtgaaaatgatgca

SEQ ID NO: 175444 - DNA, 15 bp, Homo sapiens
gtgaaaatgatgcag

SEQ ID NO: 175445 - DNA, 15 bp, Homo sapiens
tgaaaatgatgcagg

SEQ ID NO: 175446 - DNA, 15 bp, Homo sapiens
gaaaatgatgcagga

SEQ ID NO: 175447 - DNA, 15 bp, Homo sapiens
aaaatgatgcaggaa

SEQ ID NO: 175448 - DNA, 15 bp, Homo sapiens
aaatgatgcaggaat

SEQ ID NO: 175449 - DNA, 15 bp, Homo sapiens
aatgatgcaggaatc

SEQ ID NO: 175450 - DNA, 15 bp, Homo sapiens
atgatgcaggaatca

SEQ ID NO: 175451 - DNA, 15 bp, Homo sapiens
tgatgcaggaatcag

SEQ ID NO: 175452 - DNA, 15 bp, Homo sapiens
gatgcaggaatcaga

SEQ ID NO: 175453 - DNA, 15 bp, Homo sapiens
atgcaggaatcagaa

SEQ ID NO: 175454 - DNA, 15 bp, Homo sapiens
tgcaggaatcagaag

SEQ ID NO: 175455 - DNA, 15 bp, Homo sapiens
gcaggaatcagaagc

SEQ ID NO: 175456 - DNA, 15 bp, Homo sapiens
caggaatcagaagca

SEQ ID NO: 175457 - DNA, 15 bp, Homo sapiens
aggaatcagaagcat

SEQ ID NO: 175458 - DNA, 15 bp, Homo sapiens
ggaatcagaagcata

SEQ ID NO: 175459 - DNA, 15 bp, Homo sapiens
gaatcagaagcatat

SEQ ID NO: 175460 - DNA, 15 bp, Homo sapiens
aatcagaagcatatt

SEQ ID NO: 175461 - DNA, 15 bp, Homo sapiens
atcagaagcatattc

SEQ ID NO: 175462 - DNA, 15 bp, Homo sapiens
tcagaagcatattct

SEQ ID NO: 175463 - DNA, 15 bp, Homo sapiens
cagaagcatattctg

SEQ ID NO: 175464 - DNA, 15 bp, Homo sapiens
agaagcatattctgc

SEQ ID NO: 175465 - DNA, 15 bp, Homo sapiens
gaagcatattctgct

SEQ ID NO: 175466 - DNA, 15 bp, Homo sapiens
aagcatattctgctg

SEQ ID NO: 175467 - DNA, 15 bp, Homo sapiens
agcatattctgctga

SEQ ID NO: 175468 - DNA, 15 bp, Homo sapiens
gcatattctgctgag

SEQ ID NO: 175469 - DNA, 15 bp, Homo sapiens
catattctgctgaga

SEQ ID NO: 175470 - DNA, 15 bp, Homo sapiens
atattctgctgagaa

SEQ ID NO: 175471 - DNA, 15 bp, Homo sapiens
tattctgctgagaaa

SEQ ID NO: 175472 - DNA, 15 bp, Homo sapiens
attctgctgagaaac

SEQ ID NO: 175473 - DNA, 15 bp, Homo sapiens
ttctgctgagaaact

SEQ ID NO: 175474 - DNA, 15 bp, Homo sapiens
tctgctgagaaacta

SEQ ID NO: 175475 - DNA, 15 bp, Homo sapiens
ctgctgagaaactag

SEQ ID NO: 175476 - DNA, 15 bp, Homo sapiens
tgctgagaaactagg

SEQ ID NO: 175477 - DNA, 15 bp, Homo sapiens
gctgagaaactaggt

SEQ ID NO: 175478 - DNA, 15 bp, Homo sapiens
ctgagaaactaggta

SEQ ID NO: 175479 - DNA, 15 bp, Homo sapiens
tgagaaactaggtag

SEQ ID NO: 175480 - DNA, 15 bp, Homo sapiens
gagaaactaggtagt

SEQ ID NO: 175481 - DNA, 15 bp, Homo sapiens
agaaactaggtagtt

SEQ ID NO: 175482 - DNA, 15 bp, Homo sapiens
gaaactaggtagttg

SEQ ID NO: 175483 - DNA, 15 bp, Homo sapiens
aaactaggtagttga

SEQ ID NO: 175484 - DNA, 15 bp, Homo sapiens
aactaggtagttgac

SEQ ID NO: 175485 - DNA, 15 bp, Homo sapiens
actaggtagttgaca

SEQ ID NO: 175486 - DNA, 15 bp, Homo sapiens
ctaggtagttgacac

SEQ ID NO: 175487 - DNA, 15 bp, Homo sapiens
taggtagttgacact

SEQ ID NO: 175488 - DNA, 15 bp, Homo sapiens
aggtagttgacactt

SEQ ID NO: 175489 - DNA, 15 bp, Homo sapiens
ggtagttgacacttt

SEQ ID NO: 175490 - DNA, 15 bp, Homo sapiens
gtagttgacactttc

SEQ ID NO: 175491 - DNA, 15 bp, Homo sapiens
tagttgacactttcc

SEQ ID NO: 175492 - DNA, 15 bp, Homo sapiens
agttgacactttccc

SEQ ID NO: 175493 - DNA, 15 bp, Homo sapiens
gttgacactttcccg

SEQ ID NO: 175494 - DNA, 15 bp, Homo sapiens
ttgacactttcccga

SEQ ID NO: 175495 - DNA, 15 bp, Homo sapiens
tgacactttcccgaa

SEQ ID NO: 175496 - DNA, 15 bp, Homo sapiens
gacactttcccgaac

SEQ ID NO: 175497 - DNA, 15 bp, Homo sapiens
acactttcccgaact

SEQ ID NO: 175498 - DNA, 15 bp, Homo sapiens
cactttcccgaactg

SEQ ID NO: 175499 - DNA, 15 bp, Homo sapiens
actttcccgaactgg

SEQ ID NO: 175500 - DNA, 15 bp, Homo sapiens
ctttcccgaactgga

SEQ ID NO: 175501 - DNA, 15 bp, Homo sapiens
tttcccgaactggaa

SEQ ID NO: 175502 - DNA, 15 bp, Homo sapiens
ttcccgaactggaaa

SEQ ID NO: 175503 - DNA, 15 bp, Homo sapiens
tcccgaactggaaaa

SEQ ID NO: 175504 - DNA, 15 bp, Homo sapiens
cccgaactggaaaaa

SEQ ID NO: 175505 - DNA, 15 bp, Homo sapiens
ccgaactggaaaaac

SEQ ID NO: 175506 - DNA, 15 bp, Homo sapiens
cgaactggaaaaaca

SEQ ID NO: 175507 - DNA, 15 bp, Homo sapiens
gaactggaaaaacat

SEQ ID NO: 175508 - DNA, 15 bp, Homo sapiens
aactggaaaaacatt

SEQ ID NO: 175509 - DNA, 15 bp, Homo sapiens
actggaaaaacattt

SEQ ID NO: 175510 - DNA, 15 bp, Homo sapiens
ctggaaaaacatttc

SEQ ID NO: 175511 - DNA, 15 bp, Homo sapiens
tggaaaaacatttca

SEQ ID NO: 175512 - DNA, 15 bp, Homo sapiens
ggaaaaacatttcat

SEQ ID NO: 175513 - DNA, 15 bp, Homo sapiens
gaaaaacatttcata

SEQ ID NO: 175514 - DNA, 15 bp, Homo sapiens
aaaaacatttcataa

SEQ ID NO: 175515 - DNA, 15 bp, Homo sapiens
aaaacatttcataag

SEQ ID NO: 175516 - DNA, 15 bp, Homo sapiens
aaacatttcataaga

SEQ ID NO: 175517 - DNA, 15 bp, Homo sapiens
aacatttcataagaa

SEQ ID NO: 175518 - DNA, 15 bp, Homo sapiens
acatttcataagaag

SEQ ID NO: 175519 - DNA, 15 bp, Homo sapiens
catttcataagaagg

SEQ ID NO: 175520 - DNA, 15 bp, Homo sapiens
atttcataagaaggc

SEQ ID NO: 175521 - DNA, 15 bp, Homo sapiens
tttcataagaaggca

SEQ ID NO: 175522 - DNA, 15 bp, Homo sapiens
ttcataagaaggcat

SEQ ID NO: 175523 - DNA, 15 bp, Homo sapiens
tcataagaaggcata

SEQ ID NO: 175524 - DNA, 15 bp, Homo sapiens
cataagaaggcatac

SEQ ID NO: 175525 - DNA, 15 bp, Homo sapiens
ataagaaggcataca

SEQ ID NO: 175526 - DNA, 15 bp, Homo sapiens
taagaaggcatacag

SEQ ID NO: 175527 - DNA, 15 bp, Homo sapiens
aagaaggcatacagt

SEQ ID NO: 175528 - DNA, 15 bp, Homo sapiens
agaaggcatacagtt

SEQ ID NO: 175529 - DNA, 15 bp, Homo sapiens
gaaggcatacagtta

SEQ ID NO: 175530 - DNA, 15 bp, Homo sapiens
aaggcatacagttat

SEQ ID NO: 175531 - DNA, 15 bp, Homo sapiens
aggcatacagttatt

SEQ ID NO: 175532 - DNA, 15 bp, Homo sapiens
ggcatacagttattg

SEQ ID NO: 175533 - DNA, 15 bp, Homo sapiens
gcatacagttattgg

SEQ ID NO: 175534 - DNA, 15 bp, Homo sapiens
catacagttattggt

SEQ ID NO: 175535 - DNA, 15 bp, Homo sapiens
atacagttattggtt

SEQ ID NO: 175536 - DNA, 15 bp, Homo sapiens
tacagttattggttg

SEQ ID NO: 175537 - DNA, 15 bp, Homo sapiens
acagttattggttga

SEQ ID NO: 175538 - DNA, 15 bp, Homo sapiens
cagttattggttgaa

SEQ ID NO: 175539 - DNA, 15 bp, Homo sapiens
agttattggttgaat

SEQ ID NO: 175540 - DNA, 15 bp, Homo sapiens
gttattggttgaatc

SEQ ID NO: 175541 - DNA, 15 bp, Homo sapiens
ttattggttgaatca

SEQ ID NO: 175542 - DNA, 15 bp, Homo sapiens
tattggttgaatcac

SEQ ID NO: 175543 - DNA, 15 bp, Homo sapiens
attggttgaatcaca

SEQ ID NO: 175544 - DNA, 15 bp, Homo sapiens
ttggttgaatcacat

SEQ ID NO: 175545 - DNA, 15 bp, Homo sapiens
tggttgaatcacatt

SEQ ID NO: 175546 - DNA, 15 bp, Homo sapiens
ggttgaatcacattt

SEQ ID NO: 175547 - DNA, 15 bp, Homo sapiens
gttgaatcacatttg

SEQ ID NO: 175548 - DNA, 15 bp, Homo sapiens
ttgaatcacatttgt

SEQ ID NO: 175549 - DNA, 15 bp, Homo sapiens
tgaatcacatttgtt

SEQ ID NO: 175550 - DNA, 15 bp, Homo sapiens
gaatcacatttgttc

SEQ ID NO: 175551 - DNA, 15 bp, Homo sapiens
aatcacatttgttct

SEQ ID NO: 175552 - DNA, 15 bp, Homo sapiens
atcacatttgttcta

SEQ ID NO: 175553 - DNA, 15 bp, Homo sapiens
tcacatttgttctaa

SEQ ID NO: 175554 - DNA, 15 bp, Homo sapiens
cacatttgttctaaa

SEQ ID NO: 175555 - DNA, 15 bp, Homo sapiens
acatttgttctaaaa

SEQ ID NO: 175556 - DNA, 15 bp, Homo sapiens
catttgttctaaaaa

SEQ ID NO: 175557 - DNA, 15 bp, Homo sapiens
atttgttctaaaaat

SEQ ID NO: 175558 - DNA, 15 bp, Homo sapiens
tttgttctaaaaata

SEQ ID NO: 175559 - DNA, 15 bp, Homo sapiens
ttgttctaaaaataa

SEQ ID NO: 175560 - DNA, 15 bp, Homo sapiens
tgttctaaaaataat

SEQ ID NO: 175561 - DNA, 15 bp, Homo sapiens
gttctaaaaataatt

SEQ ID NO: 175562 - DNA, 15 bp, Homo sapiens
ttctaaaaataattc

SEQ ID NO: 175563 - DNA, 15 bp, Homo sapiens
tctaaaaataattcg

SEQ ID NO: 175564 - DNA, 15 bp, Homo sapiens
ctaaaaataattcgt

SEQ ID NO: 175565 - DNA, 15 bp, Homo sapiens
taaaaataattcgtg

SEQ ID NO: 175566 - DNA, 15 bp, Homo sapiens
aaaaataattcgtgc

SEQ ID NO: 175567 - DNA, 15 bp, Homo sapiens
aaaataattcgtgct

SEQ ID NO: 175568 - DNA, 15 bp, Homo sapiens
aaataattcgtgctt

SEQ ID NO: 175569 - DNA, 15 bp, Homo sapiens
aataattcgtgctta

SEQ ID NO: 175570 - DNA, 15 bp, Homo sapiens
ataattcgtgcttag

SEQ ID NO: 175571 - DNA, 15 bp, Homo sapiens
taattcgtgcttagt

SEQ ID NO: 175572 - DNA, 15 bp, Homo sapiens
aattcgtgcttagtg

SEQ ID NO: 175573 - DNA, 15 bp, Homo sapiens
attcgtgcttagtga

SEQ ID NO: 175574 - DNA, 15 bp, Homo sapiens
ttcgtgcttagtgaa

SEQ ID NO: 175575 - DNA, 15 bp, Homo sapiens
tcgtgcttagtgaaa

SEQ ID NO: 175576 - DNA, 15 bp, Homo sapiens
cgtgcttagtgaaac

SEQ ID NO: 175577 - DNA, 15 bp, Homo sapiens
gtgcttagtgaaaca

SEQ ID NO: 175578 - DNA, 15 bp, Homo sapiens
tgcttagtgaaacag

SEQ ID NO: 175579 - DNA, 15 bp, Homo sapiens
gcttagtgaaacagc

SEQ ID NO: 175580 - DNA, 15 bp, Homo sapiens
cttagtgaaacagct

SEQ ID NO: 175581 - DNA, 15 bp, Homo sapiens
ttagtgaaacagctt

SEQ ID NO: 175582 - DNA, 15 bp, Homo sapiens
tagtgaaacagctta

SEQ ID NO: 175583 - DNA, 15 bp, Homo sapiens
agtgaaacagcttac

SEQ ID NO: 175584 - DNA, 15 bp, Homo sapiens
gtgaaacagcttacc

SEQ ID NO: 175585 - DNA, 15 bp, Homo sapiens
tgaaacagcttacca

SEQ ID NO: 175586 - DNA, 15 bp, Homo sapiens
gaaacagcttaccag

SEQ ID NO: 175587 - DNA, 15 bp, Homo sapiens
aaacagcttaccagc

SEQ ID NO: 175588 - DNA, 15 bp, Homo sapiens
aacagcttaccagcc

SEQ ID NO: 175589 - DNA, 15 bp, Homo sapiens
acagcttaccagccg

SEQ ID NO: 175590 - DNA, 15 bp, Homo sapiens
cagcttaccagccgc

SEQ ID NO: 175591 - DNA, 15 bp, Homo sapiens
agcttaccagccgcc

SEQ ID NO: 175592 - DNA, 15 bp, Homo sapiens
gcttaccagccgcca

SEQ ID NO: 175593 - DNA, 15 bp, Homo sapiens
cttaccagccgccac

SEQ ID NO: 175594 - DNA, 15 bp, Homo sapiens
ttaccagccgccaca

SEQ ID NO: 175595 - DNA, 15 bp, Homo sapiens
taccagccgccacaa

SEQ ID NO: 175596 - DNA, 15 bp, Homo sapiens
accagccgccacaac

SEQ ID NO: 175597 - DNA, 15 bp, Homo sapiens
ccagccgccacaact

SEQ ID NO: 175598 - DNA, 15 bp, Homo sapiens
cagccgccacaactc

SEQ ID NO: 175599 - DNA, 15 bp, Homo sapiens
agccgccacaactct

SEQ ID NO: 175600 - DNA, 15 bp, Homo sapiens
gccgccacaactctg

SEQ ID NO: 175601 - DNA, 15 bp, Homo sapiens
ccgccacaactctgg

SEQ ID NO: 175602 - DNA, 15 bp, Homo sapiens
cgccacaactctggg

SEQ ID NO: 175603 - DNA, 15 bp, Homo sapiens
gccacaactctggga

SEQ ID NO: 175604 - DNA, 15 bp, Homo sapiens
ccacaactctgggat

SEQ ID NO: 175605 - DNA, 15 bp, Homo sapiens
cacaactctgggatc

SEQ ID NO: 175606 - DNA, 15 bp, Homo sapiens
acaactctgggatcc

SEQ ID NO: 175607 - DNA, 15 bp, Homo sapiens
caactctgggatcct

SEQ ID NO: 175608 - DNA, 15 bp, Homo sapiens
aactctgggatcctc

SEQ ID NO: 175609 - DNA, 15 bp, Homo sapiens
actctgggatcctca

SEQ ID NO: 175610 - DNA, 15 bp, Homo sapiens
ctctgggatcctcat

SEQ ID NO: 175611 - DNA, 15 bp, Homo sapiens
tctgggatcctcatg

SEQ ID NO: 175612 - DNA, 15 bp, Homo sapiens
ctgggatcctcatgg

SEQ ID NO: 175613 - DNA, 15 bp, Homo sapiens
tgggatcctcatggg

SEQ ID NO: 175614 - DNA, 15 bp, Homo sapiens
gggatcctcatggga

SEQ ID NO: 175615 - DNA, 15 bp, Homo sapiens
ggatcctcatgggac

SEQ ID NO: 175616 - DNA, 15 bp, Homo sapiens
gatcctcatgggact

SEQ ID NO: 175617 - DNA, 15 bp, Homo sapiens
atcctcatgggactt

SEQ ID NO: 175618 - DNA, 15 bp, Homo sapiens
tcctcatgggactta

SEQ ID NO: 175619 - DNA, 15 bp, Homo sapiens
cctcatgggacttat

SEQ ID NO: 175620 - DNA, 15 bp, Homo sapiens
ctcatgggacttatg

SEQ ID NO: 175621 - DNA, 15 bp, Homo sapiens
tcatgggacttatgt

SEQ ID NO: 175622 - DNA, 15 bp, Homo sapiens
catgggacttatgtc

SEQ ID NO: 175623 - DNA, 15 bp, Homo sapiens
atgggacttatgtct

SEQ ID NO: 175624 - DNA, 15 bp, Homo sapiens
tgggacttatgtctc

SEQ ID NO: 175625 - DNA, 15 bp, Homo sapiens
gggacttatgtctcc

SEQ ID NO: 175626 - DNA, 15 bp, Homo sapiens
ggacttatgtctccc

SEQ ID NO: 175627 - DNA, 15 bp, Homo sapiens
gacttatgtctccca

SEQ ID NO: 175628 - DNA, 15 bp, Homo sapiens
acttatgtctcccag

SEQ ID NO: 175629 - DNA, 15 bp, Homo sapiens
cttatgtctcccagc

SEQ ID NO: 175630 - DNA, 15 bp, Homo sapiens
ttatgtctcccagct

SEQ ID NO: 175631 - DNA, 15 bp, Homo sapiens
tatgtctcccagctg

SEQ ID NO: 175632 - DNA, 15 bp, Homo sapiens
atgtctcccagctgc

SEQ ID NO: 175633 - DNA, 15 bp, Homo sapiens
tgtctcccagctgca

SEQ ID NO: 175634 - DNA, 15 bp, Homo sapiens
gtctcccagctgcac

SEQ ID NO: 175635 - DNA, 15 bp, Homo sapiens
tctcccagctgcacg

SEQ ID NO: 175636 - DNA, 15 bp, Homo sapiens
ctcccagctgcacga

SEQ ID NO: 175637 - DNA, 15 bp, Homo sapiens
tcccagctgcacgac

SEQ ID NO: 175638 - DNA, 15 bp, Homo sapiens
cccagctgcacgact

SEQ ID NO: 175639 - DNA, 15 bp, Homo sapiens
ccagctgcacgacta

SEQ ID NO: 175640 - DNA, 15 bp, Homo sapiens
cagctgcacgactat

SEQ ID NO: 175641 - DNA, 15 bp, Homo sapiens
agctgcacgactatc

SEQ ID NO: 175642 - DNA, 15 bp, Homo sapiens
gctgcacgactatct

SEQ ID NO: 175643 - DNA, 15 bp, Homo sapiens
ctgcacgactatctg

SEQ ID NO: 175644 - DNA, 15 bp, Homo sapiens
tgcacgactatctgc

SEQ ID NO: 175645 - DNA, 15 bp, Homo sapiens
gcacgactatctgca

SEQ ID NO: 175646 - DNA, 15 bp, Homo sapiens
cacgactatctgcac

SEQ ID NO: 175647 - DNA, 15 bp, Homo sapiens
acgactatctgcact

SEQ ID NO: 175648 - DNA, 15 bp, Homo sapiens
cgactatctgcactc

SEQ ID NO: 175649 - DNA, 15 bp, Homo sapiens
gactatctgcactct

SEQ ID NO: 175650 - DNA, 15 bp, Homo sapiens
actatctgcactctc

SEQ ID NO: 175651 - DNA, 15 bp, Homo sapiens
ctatctgcactctca

SEQ ID NO: 175652 - DNA, 15 bp, Homo sapiens
tatctgcactctcat

SEQ ID NO: 175653 - DNA, 15 bp, Homo sapiens
atctgcactctcatt

SEQ ID NO: 175654 - DNA, 15 bp, Homo sapiens
tctgcactctcattc

SEQ ID NO: 175655 - DNA, 15 bp, Homo sapiens
ctgcactctcattcc

SEQ ID NO: 175656 - DNA, 15 bp, Homo sapiens
tgcactctcattcca

SEQ ID NO: 175657 - DNA, 15 bp, Homo sapiens
gcactctcattccac

SEQ ID NO: 175658 - DNA, 15 bp, Homo sapiens
cactctcattccacc

SEQ ID NO: 175659 - DNA, 15 bp, Homo sapiens
actctcattccacca

SEQ ID NO: 175660 - DNA, 15 bp, Homo sapiens
ctctcattccaccaa

SEQ ID NO: 175661 - DNA, 15 bp, Homo sapiens
tctcattccaccaaa

SEQ ID NO: 175662 - DNA, 15 bp, Homo sapiens
ctcattccaccaaag

SEQ ID NO: 175663 - DNA, 15 bp, Homo sapiens
tcattccaccaaaga

SEQ ID NO: 175664 - DNA, 15 bp, Homo sapiens
cattccaccaaagaa

SEQ ID NO: 175665 - DNA, 15 bp, Homo sapiens
attccaccaaagaac

SEQ ID NO: 175666 - DNA, 15 bp, Homo sapiens
ttccaccaaagaaca

SEQ ID NO: 175667 - DNA, 15 bp, Homo sapiens
tccaccaaagaacat

SEQ ID NO: 175668 - DNA, 15 bp, Homo sapiens
ccaccaaagaacatg

SEQ ID NO: 175669 - DNA, 15 bp, Homo sapiens
caccaaagaacatga

SEQ ID NO: 175670 - DNA, 15 bp, Homo sapiens
accaaagaacatgaa

SEQ ID NO: 175671 - DNA, 15 bp, Homo sapiens
ccaaagaacatgaac

SEQ ID NO: 175672 - DNA, 15 bp, Homo sapiens
caaagaacatgaact

SEQ ID NO: 175673 - DNA, 15 bp, Homo sapiens
aaagaacatgaactg

SEQ ID NO: 175674 - DNA, 15 bp, Homo sapiens
aagaacatgaactgc

SEQ ID NO: 175675 - DNA, 15 bp, Homo sapiens
agaacatgaactgca

SEQ ID NO: 175676 - DNA, 15 bp, Homo sapiens
gaacatgaactgcag

SEQ ID NO: 175677 - DNA, 15 bp, Homo sapiens
aacatgaactgcaga

SEQ ID NO: 175678 - DNA, 15 bp, Homo sapiens
acatgaactgcagaa

SEQ ID NO: 175679 - DNA, 15 bp, Homo sapiens
catgaactgcagaaa

SEQ ID NO: 175680 - DNA, 15 bp, Homo sapiens
atgaactgcagaaat

SEQ ID NO: 175681 - DNA, 15 bp, Homo sapiens
tgaactgcagaaata

SEQ ID NO: 175682 - DNA, 15 bp, Homo sapiens
gaactgcagaaataa

SEQ ID NO: 175683 - DNA, 15 bp, Homo sapiens
aactgcagaaataaa

SEQ ID NO: 175684 - DNA, 15 bp, Homo sapiens
actgcagaaataaac

SEQ ID NO: 175685 - DNA, 15 bp, Homo sapiens
ctgcagaaataaacc

SEQ ID NO: 175686 - DNA, 15 bp, Homo sapiens
tgcagaaataaacca

SEQ ID NO: 175687 - DNA, 15 bp, Homo sapiens
gcagaaataaaccac

SEQ ID NO: 175688 - DNA, 15 bp, Homo sapiens
cagaaataaaccaca

SEQ ID NO: 175689 - DNA, 15 bp, Homo sapiens
agaaataaaccacaa

SEQ ID NO: 175690 - DNA, 15 bp, Homo sapiens
gaaataaaccacaag

SEQ ID NO: 175691 - DNA, 15 bp, Homo sapiens
aaataaaccacaagt

SEQ ID NO: 175692 - DNA, 15 bp, Homo sapiens
aataaaccacaagta

SEQ ID NO: 175693 - DNA, 15 bp, Homo sapiens
ataaaccacaagtag

SEQ ID NO: 175694 - DNA, 15 bp, Homo sapiens
taaaccacaagtagt

SEQ ID NO: 175695 - DNA, 15 bp, Homo sapiens
aaaccacaagtagtt

SEQ ID NO: 175696 - DNA, 15 bp, Homo sapiens
aaccacaagtagttt

SEQ ID NO: 175697 - DNA, 15 bp, Homo sapiens
accacaagtagtttc

SEQ ID NO: 175698 - DNA, 15 bp, Homo sapiens
ccacaagtagtttct

SEQ ID NO: 175699 - DNA, 15 bp, Homo sapiens
cacaagtagtttctg

SEQ ID NO: 175700 - DNA, 15 bp, Homo sapiens
acaagtagtttctga

SEQ ID NO: 175701 - DNA, 15 bp, Homo sapiens
caagtagtttctgaa

SEQ ID NO: 175702 - DNA, 15 bp, Homo sapiens
aagtagtttctgaaa

SEQ ID NO: 175703 - DNA, 15 bp, Homo sapiens
agtagtttctgaaat

SEQ ID NO: 175704 - DNA, 15 bp, Homo sapiens
gtagtttctgaaata

SEQ ID NO: 175705 - DNA, 15 bp, Homo sapiens
tagtttctgaaatat

SEQ ID NO: 175706 - DNA, 15 bp, Homo sapiens
agtttctgaaatata

SEQ ID NO: 175707 - DNA, 15 bp, Homo sapiens
gtttctgaaatatat

SEQ ID NO: 175708 - DNA, 15 bp, Homo sapiens
tttctgaaatatatg

SEQ ID NO: 175709 - DNA, 15 bp, Homo sapiens
ttctgaaatatatgg

SEQ ID NO: 175710 - DNA, 15 bp, Homo sapiens
tctgaaatatatggc

SEQ ID NO: 175711 - DNA, 15 bp, Homo sapiens
ctgaaatatatggca

SEQ ID NO: 175712 - DNA, 15 bp, Homo sapiens
tgaaatatatggcaa

SEQ ID NO: 175713 - DNA, 15 bp, Homo sapiens
gaaatatatggcaat

SEQ ID NO: 175714 - DNA, 15 bp, Homo sapiens
aaatatatggcaata

SEQ ID NO: 175715 - DNA, 15 bp, Homo sapiens
aatatatggcaatag

SEQ ID NO: 175716 - DNA, 15 bp, Homo sapiens
atatatggcaatagc

SEQ ID NO: 175717 - DNA, 15 bp, Homo sapiens
tatatggcaatagca

SEQ ID NO: 175718 - DNA, 15 bp, Homo sapiens
atatggcaatagcaa

SEQ ID NO: 175719 - DNA, 15 bp, Homo sapiens
tatggcaatagcaaa

SEQ ID NO: 175720 - DNA, 15 bp, Homo sapiens
atggcaatagcaaat

SEQ ID NO: 175721 - DNA, 15 bp, Homo sapiens
tggcaatagcaaata

SEQ ID NO: 175722 - DNA, 15 bp, Homo sapiens
ggcaatagcaaataa

SEQ ID NO: 175723 - DNA, 15 bp, Homo sapiens
gcaatagcaaataag

SEQ ID NO: 175724 - DNA, 15 bp, Homo sapiens
caatagcaaataaga

SEQ ID NO: 175725 - DNA, 15 bp, Homo sapiens
aatagcaaataagaa

SEQ ID NO: 175726 - DNA, 15 bp, Homo sapiens
atagcaaataagaaa

SEQ ID NO: 175727 - DNA, 15 bp, Homo sapiens
tagcaaataagaaat

SEQ ID NO: 175728 - DNA, 15 bp, Homo sapiens
agcaaataagaaata

SEQ ID NO: 175729 - DNA, 15 bp, Homo sapiens
gcaaataagaaatat

SEQ ID NO: 175730 - DNA, 15 bp, Homo sapiens
caaataagaaatatt

SEQ ID NO: 175731 - DNA, 15 bp, Homo sapiens
aaataagaaatattg

SEQ ID NO: 175732 - DNA, 15 bp, Homo sapiens
aataagaaatattga

SEQ ID NO: 175733 - DNA, 15 bp, Homo sapiens
ataagaaatattgaa

SEQ ID NO: 175734 - DNA, 15 bp, Homo sapiens
taagaaatattgaaa

SEQ ID NO: 175735 - DNA, 15 bp, Homo sapiens
aagaaatattgaaaa

SEQ ID NO: 175736 - DNA, 15 bp, Homo sapiens
agaaatattgaaaaa

SEQ ID NO: 175737 - DNA, 15 bp, Homo sapiens
gaaatattgaaaaag

SEQ ID NO: 175738 - DNA, 15 bp, Homo sapiens
aaatattgaaaaagt

SEQ ID NO: 175739 - DNA, 15 bp, Homo sapiens
aatattgaaaaagtg

SEQ ID NO: 175740 - DNA, 15 bp, Homo sapiens
atattgaaaaagtga

SEQ ID NO: 175741 - DNA, 15 bp, Homo sapiens
tattgaaaaagtgaa

SEQ ID NO: 175742 - DNA, 15 bp, Homo sapiens
attgaaaaagtgaat

SEQ ID NO: 175743 - DNA, 15 bp, Homo sapiens
ttgaaaaagtgaatc

SEQ ID NO: 175744 - DNA, 15 bp, Homo sapiens
tgaaaaagtgaatca

SEQ ID NO: 175745 - DNA, 15 bp, Homo sapiens
gaaaaagtgaatcag

SEQ ID NO: 175746 - DNA, 15 bp, Homo sapiens
aaaaagtgaatcaga

SEQ ID NO: 175747 - DNA, 15 bp, Homo sapiens
aaaagtgaatcagaa

SEQ ID NO: 175748 - DNA, 15 bp, Homo sapiens
aaagtgaatcagaaa

SEQ ID NO: 175749 - DNA, 15 bp, Homo sapiens
aagtgaatcagaaat

SEQ ID NO: 175750 - DNA, 15 bp, Homo sapiens
agtgaatcagaaatg

SEQ ID NO: 175751 - DNA, 15 bp, Homo sapiens
gtgaatcagaaatgt

SEQ ID NO: 175752 - DNA, 15 bp, Homo sapiens
tgaatcagaaatgtt

SEQ ID NO: 175753 - DNA, 15 bp, Homo sapiens
gaatcagaaatgttg

SEQ ID NO: 175754 - DNA, 15 bp, Homo sapiens
aatcagaaatgttgt

SEQ ID NO: 175755 - DNA, 15 bp, Homo sapiens
atcagaaatgttgtc

SEQ ID NO: 175756 - DNA, 15 bp, Homo sapiens
tcagaaatgttgtct

SEQ ID NO: 175757 - DNA, 15 bp, Homo sapiens
cagaaatgttgtctt

SEQ ID NO: 175758 - DNA, 15 bp, Homo sapiens
agaaatgttgtctta

SEQ ID NO: 175759 - DNA, 15 bp, Homo sapiens
gaaatgttgtcttat

SEQ ID NO: 175760 - DNA, 15 bp, Homo sapiens
aaatgttgtcttatt

SEQ ID NO: 175761 - DNA, 15 bp, Homo sapiens
aatgttgtcttattc

SEQ ID NO: 175762 - DNA, 15 bp, Homo sapiens
atgttgtcttattct

SEQ ID NO: 175763 - DNA, 15 bp, Homo sapiens
tgttgtcttattctt

SEQ ID NO: 175764 - DNA, 15 bp, Homo sapiens
gttgtcttattcttt

SEQ ID NO: 175765 - DNA, 15 bp, Homo sapiens
ttgtcttattcttta

SEQ ID NO: 175766 - DNA, 15 bp, Homo sapiens
tgtcttattctttaa

SEQ ID NO: 175767 - DNA, 15 bp, Homo sapiens
gtcttattctttaaa

SEQ ID NO: 175768 - DNA, 15 bp, Homo sapiens
tcttattctttaaat

SEQ ID NO: 175769 - DNA, 15 bp, Homo sapiens
cttattctttaaatc

SEQ ID NO: 175770 - DNA, 15 bp, Homo sapiens
ttattctttaaatca

SEQ ID NO: 175771 - DNA, 15 bp, Homo sapiens
tattctttaaatcaa

SEQ ID NO: 175772 - DNA, 15 bp, Homo sapiens
attctttaaatcaaa

SEQ ID NO: 175773 - DNA, 15 bp, Homo sapiens
ttctttaaatcaaaa

SEQ ID NO: 175774 - DNA, 15 bp, Homo sapiens
tctttaaatcaaaat

SEQ ID NO: 175775 - DNA, 15 bp, Homo sapiens
ctttaaatcaaaatc

SEQ ID NO: 175776 - DNA, 15 bp, Homo sapiens
tttaaatcaaaatca

SEQ ID NO: 175777 - DNA, 15 bp, Homo sapiens
ttaaatcaaaatcaa

SEQ ID NO: 175778 - DNA, 15 bp, Homo sapiens
taaatcaaaatcaaa

SEQ ID NO: 175779 - DNA, 15 bp, Homo sapiens
aaatcaaaatcaaaa

SEQ ID NO: 175780 - DNA, 15 bp, Homo sapiens
aatcaaaatcaaaag

SEQ ID NO: 175781 - DNA, 15 bp, Homo sapiens
aaatcaaaaggtaaa

SEQ ID NO: 175782 - DNA, 15 bp, Homo sapiens
aatcaaaaggtaaaa

SEQ ID NO: 175783 - DNA, 15 bp, Homo sapiens
atcaaaaggtaaaac

SEQ ID NO: 175784 - DNA, 15 bp, Homo sapiens
tcaaaaggtaaaact

SEQ ID NO: 175785 - DNA, 15 bp, Homo sapiens
caaaaggtaaaacta

SEQ ID NO: 175786 - DNA, 15 bp, Homo sapiens
aaaaggtaaaactaa

SEQ ID NO: 175787 - DNA, 15 bp, Homo sapiens
aaaggtaaaactaaa

SEQ ID NO: 175788 - DNA, 15 bp, Homo sapiens
aaggtaaaactaaat

SEQ ID NO: 175789 - DNA, 15 bp, Homo sapiens
aggtaaaactaaata

SEQ ID NO: 175790 - DNA, 15 bp, Homo sapiens
ggtaaaactaaatat

SEQ ID NO: 175791 - DNA, 15 bp, Homo sapiens
gtaaaactaaatatg

SEQ ID NO: 175792 - DNA, 15 bp, Homo sapiens
taaaactaaatatgt

SEQ ID NO: 175793 - DNA, 15 bp, Homo sapiens
aaaactaaatatgtt

SEQ ID NO: 175794 - DNA, 15 bp, Homo sapiens
aaactaaatatgtta

SEQ ID NO: 175795 - DNA, 15 bp, Homo sapiens
aactaaatatgttag

SEQ ID NO: 175796 - DNA, 15 bp, Homo sapiens
actaaatatgttagt

SEQ ID NO: 175797 - DNA, 15 bp, Homo sapiens
ctaaatatgttagtt

SEQ ID NO: 175798 - DNA, 15 bp, Homo sapiens
taaatatgttagtta

SEQ ID NO: 175799 - DNA, 15 bp, Homo sapiens
aaatatgttagttat

SEQ ID NO: 175800 - DNA, 15 bp, Homo sapiens
aatatgttagttata

SEQ ID NO: 175801 - DNA, 15 bp, Homo sapiens
atatgttagttataa

SEQ ID NO: 175802 - DNA, 15 bp, Homo sapiens
tatgttagttataag

SEQ ID NO: 175803 - DNA, 15 bp, Homo sapiens
atgttagttataaga

SEQ ID NO: 175804 - DNA, 15 bp, Homo sapiens
tgttagttataagat

SEQ ID NO: 175805 - DNA, 15 bp, Homo sapiens
gttagttataagatt

SEQ ID NO: 175806 - DNA, 15 bp, Homo sapiens
ttagttataagattt

SEQ ID NO: 175807 - DNA, 15 bp, Homo sapiens
tagttataagatttc

SEQ ID NO: 175808 - DNA, 15 bp, Homo sapiens
agttataagatttca

SEQ ID NO: 175809 - DNA, 15 bp, Homo sapiens
gttataagatttcag

SEQ ID NO: 175810 - DNA, 15 bp, Homo sapiens
ttataagatttcaga

SEQ ID NO: 175811 - DNA, 15 bp, Homo sapiens
tataagatttcagag

SEQ ID NO: 175812 - DNA, 15 bp, Homo sapiens
ataagatttcagagg

SEQ ID NO: 175813 - DNA, 15 bp, Homo sapiens
taagatttcagaggg

SEQ ID NO: 175814 - DNA, 15 bp, Homo sapiens
aagatttcagaggga

SEQ ID NO: 175815 - DNA, 15 bp, Homo sapiens
agatttcagagggat

SEQ ID NO: 175816 - DNA, 15 bp, Homo sapiens
gatttcagagggatc

SEQ ID NO: 175817 - DNA, 15 bp, Homo sapiens
atttcagagggatca

SEQ ID NO: 175818 - DNA, 15 bp, Homo sapiens
tttcagagggatcag

SEQ ID NO: 175819 - DNA, 15 bp, Homo sapiens
ttcagagggatcaga

SEQ ID NO: 175820 - DNA, 15 bp, Homo sapiens
tcagagggatcagaa

SEQ ID NO: 175821 - DNA, 15 bp, Homo sapiens
cagagggatcagaaa

SEQ ID NO: 175822 - DNA, 15 bp, Homo sapiens
agagggatcagaaat

SEQ ID NO: 175823 - DNA, 15 bp, Homo sapiens
gagggatcagaaatt

SEQ ID NO: 175824 - DNA, 15 bp, Homo sapiens
agggatcagaaattt

SEQ ID NO: 175825 - DNA, 15 bp, Homo sapiens
gggatcagaaatttg

SEQ ID NO: 175826 - DNA, 15 bp, Homo sapiens
ggatcagaaatttgg

SEQ ID NO: 175827 - DNA, 15 bp, Homo sapiens
gatcagaaatttgga

SEQ ID NO: 175828 - DNA, 15 bp, Homo sapiens
atcagaaatttggaa

SEQ ID NO: 175829 - DNA, 15 bp, Homo sapiens
tcagaaatttggaag

SEQ ID NO: 175830 - DNA, 15 bp, Homo sapiens
cagaaatttggaaga

SEQ ID NO: 175831 - DNA, 15 bp, Homo sapiens
agaaatttggaagat

SEQ ID NO: 175832 - DNA, 15 bp, Homo sapiens
gaaatttggaagata

SEQ ID NO: 175833 - DNA, 15 bp, Homo sapiens
aaatttggaagataa

SEQ ID NO: 175834 - DNA, 15 bp, Homo sapiens
aatttggaagataaa

SEQ ID NO: 175835 - DNA, 15 bp, Homo sapiens
atttggaagataaat

SEQ ID NO: 175836 - DNA, 15 bp, Homo sapiens
tttggaagataaatt

SEQ ID NO: 175837 - DNA, 15 bp, Homo sapiens
ttggaagataaattt

SEQ ID NO: 175838 - DNA, 15 bp, Homo sapiens
tggaagataaattta

SEQ ID NO: 175839 - DNA, 15 bp, Homo sapiens
ggaagataaatttat

SEQ ID NO: 175840 - DNA, 15 bp, Homo sapiens
gaagataaatttata

SEQ ID NO: 175841 - DNA, 15 bp, Homo sapiens
aagataaatttataa

SEQ ID NO: 175842 - DNA, 15 bp, Homo sapiens
agataaatttataag

SEQ ID NO: 175843 - DNA, 15 bp, Homo sapiens
gataaatttataagt

SEQ ID NO: 175844 - DNA, 15 bp, Homo sapiens
ataaatttataagtt

SEQ ID NO: 175845 - DNA, 15 bp, Homo sapiens
taaatttataagtta

SEQ ID NO: 175846 - DNA, 15 bp, Homo sapiens
aaatttataagttaa

SEQ ID NO: 175847 - DNA, 15 bp, Homo sapiens
aatttataagttaaa

SEQ ID NO: 175848 - DNA, 15 bp, Homo sapiens
atttataagttaaac

SEQ ID NO: 175849 - DNA, 15 bp, Homo sapiens
tttataagttaaact

SEQ ID NO: 175850 - DNA, 15 bp, Homo sapiens
ttataagttaaactg

SEQ ID NO: 175851 - DNA, 15 bp, Homo sapiens
tataagttaaactgg

SEQ ID NO: 175852 - DNA, 15 bp, Homo sapiens
ataagttaaactgga

SEQ ID NO: 175853 - DNA, 15 bp, Homo sapiens
taagttaaactggaa

SEQ ID NO: 175854 - DNA, 15 bp, Homo sapiens
aagttaaactggaaa

SEQ ID NO: 175855 - DNA, 15 bp, Homo sapiens
agttaaactggaaac

SEQ ID NO: 175856 - DNA, 15 bp, Homo sapiens
gttaaactggaaaca

SEQ ID NO: 175857 - DNA, 15 bp, Homo sapiens
ttaaactggaaacat

SEQ ID NO: 175858 - DNA, 15 bp, Homo sapiens
taaactggaaacata

SEQ ID NO: 175859 - DNA, 15 bp, Homo sapiens
aaactggaaacataa

SEQ ID NO: 175860 - DNA, 15 bp, Homo sapiens
aactggaaacataag

SEQ ID NO: 175861 - DNA, 15 bp, Homo sapiens
actggaaacataagg

SEQ ID NO: 175862 - DNA, 15 bp, Homo sapiens
ctggaaacataaggc

SEQ ID NO: 175863 - DNA, 15 bp, Homo sapiens
tggaaacataaggct

SEQ ID NO: 175864 - DNA, 15 bp, Homo sapiens
ggaaacataaggctg

SEQ ID NO: 175865 - DNA, 15 bp, Homo sapiens
gaaacataaggctga

SEQ ID NO: 175866 - DNA, 15 bp, Homo sapiens
aaacataaggctgaa

SEQ ID NO: 175867 - DNA, 15 bp, Homo sapiens
aacataaggctgaag

SEQ ID NO: 175868 - DNA, 15 bp, Homo sapiens
acataaggctgaaga

SEQ ID NO: 175869 - DNA, 15 bp, Homo sapiens
cataaggctgaagag

SEQ ID NO: 175870 - DNA, 15 bp, Homo sapiens
ataaggctgaagaga

SEQ ID NO: 175871 - DNA, 15 bp, Homo sapiens
taaggctgaagagag

SEQ ID NO: 175872 - DNA, 15 bp, Homo sapiens
aaggctgaagagaga

SEQ ID NO: 175873 - DNA, 15 bp, Homo sapiens
aggctgaagagagaa

SEQ ID NO: 175874 - DNA, 15 bp, Homo sapiens
ggctgaagagagaat

SEQ ID NO: 175875 - DNA, 15 bp, Homo sapiens
gctgaagagagaatg

SEQ ID NO: 175876 - DNA, 15 bp, Homo sapiens
ctgaagagagaatgc

SEQ ID NO: 175877 - DNA, 15 bp, Homo sapiens
tgaagagagaatgca

SEQ ID NO: 175878 - DNA, 15 bp, Homo sapiens
gaagagagaatgcaa

SEQ ID NO: 175879 - DNA, 15 bp, Homo sapiens
aagagagaatgcaaa

SEQ ID NO: 175880 - DNA, 15 bp, Homo sapiens
agagagaatgcaaag

SEQ ID NO: 175881 - DNA, 15 bp, Homo sapiens
gagagaatgcaaaga

SEQ ID NO: 175882 - DNA, 15 bp, Homo sapiens
agagaatgcaaagaa

SEQ ID NO: 175883 - DNA, 15 bp, Homo sapiens
gagaatgcaaagaaa

SEQ ID NO: 175884 - DNA, 15 bp, Homo sapiens
agaatgcaaagaaac

SEQ ID NO: 175885 - DNA, 15 bp, Homo sapiens
gaatgcaaagaaaca

SEQ ID NO: 175886 - DNA, 15 bp, Homo sapiens
aatgcaaagaaacac

SEQ ID NO: 175887 - DNA, 15 bp, Homo sapiens
atgcaaagaaacaca

SEQ ID NO: 175888 - DNA, 15 bp, Homo sapiens
tgcaaagaaacacag

SEQ ID NO: 175889 - DNA, 15 bp, Homo sapiens
gcaaagaaacacagc

SEQ ID NO: 175890 - DNA, 15 bp, Homo sapiens
caaagaaacacagct

SEQ ID NO: 175891 - DNA, 15 bp, Homo sapiens
aaagaaacacagctt

SEQ ID NO: 175892 - DNA, 15 bp, Homo sapiens
aagaaacacagctta

SEQ ID NO: 175893 - DNA, 15 bp, Homo sapiens
agaaacacagcttaa

SEQ ID NO: 175894 - DNA, 15 bp, Homo sapiens
gaaacacagcttaag

SEQ ID NO: 175895 - DNA, 15 bp, Homo sapiens
aaacacagcttaagg

SEQ ID NO: 175896 - DNA, 15 bp, Homo sapiens
aacacagcttaaggc

SEQ ID NO: 175897 - DNA, 15 bp, Homo sapiens
acacagcttaaggca

SEQ ID NO: 175898 - DNA, 15 bp, Homo sapiens
cacagcttaaggcac

SEQ ID NO: 175899 - DNA, 15 bp, Homo sapiens
acagcttaaggcaca

SEQ ID NO: 175900 - DNA, 15 bp, Homo sapiens
cagcttaaggcacaa

SEQ ID NO: 175901 - DNA, 15 bp, Homo sapiens
agcttaaggcacaat

SEQ ID NO: 175902 - DNA, 15 bp, Homo sapiens
gcttaaggcacaatt

SEQ ID NO: 175903 - DNA, 15 bp, Homo sapiens
cttaaggcacaatta

SEQ ID NO: 175904 - DNA, 15 bp, Homo sapiens
ttaaggcacaattaa

SEQ ID NO: 175905 - DNA, 15 bp, Homo sapiens
taaggcacaattaag

SEQ ID NO: 175906 - DNA, 15 bp, Homo sapiens
aaggcacaattaaga

SEQ ID NO: 175907 - DNA, 15 bp, Homo sapiens
aggcacaattaagac

SEQ ID NO: 175908 - DNA, 15 bp, Homo sapiens
ggcacaattaagact

SEQ ID NO: 175909 - DNA, 15 bp, Homo sapiens
gcacaattaagacta

SEQ ID NO: 175910 - DNA, 15 bp, Homo sapiens
cacaattaagactag

SEQ ID NO: 175911 - DNA, 15 bp, Homo sapiens
acaattaagactaga

SEQ ID NO: 175912 - DNA, 15 bp, Homo sapiens
caattaagactagac

SEQ ID NO: 175913 - DNA, 15 bp, Homo sapiens
aattaagactagacc

SEQ ID NO: 175914 - DNA, 15 bp, Homo sapiens
attaagactagaccc

SEQ ID NO: 175915 - DNA, 15 bp, Homo sapiens
ttaagactagacccg

SEQ ID NO: 175916 - DNA, 15 bp, Homo sapiens
taagactagacccga

SEQ ID NO: 175917 - DNA, 15 bp, Homo sapiens
aagactagacccgag

SEQ ID NO: 175918 - DNA, 15 bp, Homo sapiens
agactagacccgagt

SEQ ID NO: 175919 - DNA, 15 bp, Homo sapiens
gactagacccgagtt

SEQ ID NO: 175920 - DNA, 15 bp, Homo sapiens
actagacccgagttt

SEQ ID NO: 175921 - DNA, 15 bp, Homo sapiens
ctagacccgagttta

SEQ ID NO: 175922 - DNA, 15 bp, Homo sapiens
tagacccgagtttaa

SEQ ID NO: 175923 - DNA, 15 bp, Homo sapiens
agacccgagtttaat

SEQ ID NO: 175924 - DNA, 15 bp, Homo sapiens
gacccgagtttaatg

SEQ ID NO: 175925 - DNA, 15 bp, Homo sapiens
acccgagtttaatga

SEQ ID NO: 175926 - DNA, 15 bp, Homo sapiens
cccgagtttaatgac

SEQ ID NO: 175927 - DNA, 15 bp, Homo sapiens
ccgagtttaatgact

SEQ ID NO: 175928 - DNA, 15 bp, Homo sapiens
cgagtttaatgactt

SEQ ID NO: 175929 - DNA, 15 bp, Homo sapiens
gagtttaatgacttc

SEQ ID NO: 175930 - DNA, 15 bp, Homo sapiens
agtttaatgacttcc

SEQ ID NO: 175931 - DNA, 15 bp, Homo sapiens
gtttaatgacttcct

SEQ ID NO: 175932 - DNA, 15 bp, Homo sapiens
tttaatgacttccta

SEQ ID NO: 175933 - DNA, 15 bp, Homo sapiens
ttaatgacttcctac

SEQ ID NO: 175934 - DNA, 15 bp, Homo sapiens
taatgacttcctact

SEQ ID NO: 175935 - DNA, 15 bp, Homo sapiens
aatgacttcctacta

SEQ ID NO: 175936 - DNA, 15 bp, Homo sapiens
atgacttcctactat

SEQ ID NO: 175937 - DNA, 15 bp, Homo sapiens
tgacttcctactatg

SEQ ID NO: 175938 - DNA, 15 bp, Homo sapiens
gacttcctactatgt

SEQ ID NO: 175939 - DNA, 15 bp, Homo sapiens
acttcctactatgtt

SEQ ID NO: 175940 - DNA, 15 bp, Homo sapiens
cttcctactatgttt

SEQ ID NO: 175941 - DNA, 15 bp, Homo sapiens
ttcctactatgtttt

SEQ ID NO: 175942 - DNA, 15 bp, Homo sapiens
tcctactatgtttta

SEQ ID NO: 175943 - DNA, 15 bp, Homo sapiens
cctactatgttttat

SEQ ID NO: 175944 - DNA, 15 bp, Homo sapiens
ctactatgttttatt

SEQ ID NO: 175945 - DNA, 15 bp, Homo sapiens
tactatgttttattt

SEQ ID NO: 175946 - DNA, 15 bp, Homo sapiens
actatgttttatttt

SEQ ID NO: 175947 - DNA, 15 bp, Homo sapiens
ctatgttttattttt

SEQ ID NO: 175948 - DNA, 15 bp, Homo sapiens
tatgttttatttttt

SEQ ID NO: 175949 - DNA, 15 bp, Homo sapiens
atgttttatttttta

SEQ ID NO: 175950 - DNA, 15 bp, Homo sapiens
tgttttattttttaa

SEQ ID NO: 175951 - DNA, 15 bp, Homo sapiens
gttttattttttaaa

SEQ ID NO: 175952 - DNA, 15 bp, Homo sapiens
ttttattttttaaaa

SEQ ID NO: 175953 - DNA, 15 bp, Homo sapiens
tttattttttaaaaa

SEQ ID NO: 175954 - DNA, 15 bp, Homo sapiens
ttattttttaaaaaa

SEQ ID NO: 175955 - DNA, 15 bp, Homo sapiens
tattttttaaaaaaa

SEQ ID NO: 175956 - DNA, 15 bp, Homo sapiens
attttttaaaaaaag

SEQ ID NO: 175957 - DNA, 15 bp, Homo sapiens
ttttaaaaaaagcag

SEQ ID NO: 175958 - DNA, 15 bp, Homo sapiens
tttaaaaaaagcaga

SEQ ID NO: 175959 - DNA, 15 bp, Homo sapiens
ttaaaaaaagcagat

SEQ ID NO: 175960 - DNA, 15 bp, Homo sapiens
taaaaaaagcagatt

SEQ ID NO: 175961 - DNA, 15 bp, Homo sapiens
aaaaaaagcagatta

SEQ ID NO: 175962 - DNA, 15 bp, Homo sapiens
aaaaaagcagattat

SEQ ID NO: 175963 - DNA, 15 bp, Homo sapiens
aaaaagcagattata

SEQ ID NO: 175964 - DNA, 15 bp, Homo sapiens
aaaagcagattataa

SEQ ID NO: 175965 - DNA, 15 bp, Homo sapiens
aaagcagattataaa

SEQ ID NO: 175966 - DNA, 15 bp, Homo sapiens
aagcagattataaaa

SEQ ID NO: 175967 - DNA, 15 bp, Homo sapiens
agcagattataaaaa

SEQ ID NO: 175968 - DNA, 15 bp, Homo sapiens
gcagattataaaaaa

SEQ ID NO: 175969 - DNA, 15 bp, Homo sapiens
cagattataaaaaat

SEQ ID NO: 175970 - DNA, 15 bp, Homo sapiens
agattataaaaaatt

SEQ ID NO: 175971 - DNA, 15 bp, Homo sapiens
gattataaaaaattg

SEQ ID NO: 175972 - DNA, 15 bp, Homo sapiens
attataaaaaattgt

SEQ ID NO: 175973 - DNA, 15 bp, Homo sapiens
ttataaaaaattgtt

SEQ ID NO: 175974 - DNA, 15 bp, Homo sapiens
tataaaaaattgttt

SEQ ID NO: 175975 - DNA, 15 bp, Homo sapiens
ataaaaaattgttta

SEQ ID NO: 175976 - DNA, 15 bp, Homo sapiens
taaaaaattgtttac

SEQ ID NO: 175977 - DNA, 15 bp, Homo sapiens
aaaaaattgtttact

SEQ ID NO: 175978 - DNA, 15 bp, Homo sapiens
aaaaattgtttactg

SEQ ID NO: 175979 - DNA, 15 bp, Homo sapiens
aaaattgtttactgt

SEQ ID NO: 175980 - DNA, 15 bp, Homo sapiens
aaattgtttactgta

SEQ ID NO: 175981 - DNA, 15 bp, Homo sapiens
aattgtttactgtag

SEQ ID NO: 175982 - DNA, 15 bp, Homo sapiens
attgtttactgtaga

SEQ ID NO: 175983 - DNA, 15 bp, Homo sapiens
ttgtttactgtagaa

SEQ ID NO: 175984 - DNA, 15 bp, Homo sapiens
tgtttactgtagaaa

SEQ ID NO: 175985 - DNA, 15 bp, Homo sapiens
gtttactgtagaaaa

SEQ ID NO: 175986 - DNA, 15 bp, Homo sapiens
tttactgtagaaaat

SEQ ID NO: 175987 - DNA, 15 bp, Homo sapiens
ttactgtagaaaatt

SEQ ID NO: 175988 - DNA, 15 bp, Homo sapiens
tactgtagaaaattt

SEQ ID NO: 175989 - DNA, 15 bp, Homo sapiens
actgtagaaaattta

SEQ ID NO: 175990 - DNA, 15 bp, Homo sapiens
ctgtagaaaatttag

SEQ ID NO: 175991 - DNA, 15 bp, Homo sapiens
tgtagaaaatttagg

SEQ ID NO: 175992 - DNA, 15 bp, Homo sapiens
gtagaaaatttaggt

SEQ ID NO: 175993 - DNA, 15 bp, Homo sapiens
tagaaaatttaggtg

SEQ ID NO: 175994 - DNA, 15 bp, Homo sapiens
agaaaatttaggtga

SEQ ID NO: 175995 - DNA, 15 bp, Homo sapiens
gaaaatttaggtgat

SEQ ID NO: 175996 - DNA, 15 bp, Homo sapiens
aaaatttaggtgata

SEQ ID NO: 175997 - DNA, 15 bp, Homo sapiens
aaatttaggtgatac

SEQ ID NO: 175998 - DNA, 15 bp, Homo sapiens
aatttaggtgataca

SEQ ID NO: 175999 - DNA, 15 bp, Homo sapiens
atttaggtgatacaa

SEQ ID NO: 176000 - DNA, 15 bp, Homo sapiens
tttaggtgatacaaa

SEQ ID NO: 176001 - DNA, 15 bp, Homo sapiens
ttaggtgatacaaag

SEQ ID NO: 176002 - DNA, 15 bp, Homo sapiens
taggtgatacaaaga

SEQ ID NO: 176003 - DNA, 15 bp, Homo sapiens
aggtgatacaaagaa

SEQ ID NO: 176004 - DNA, 15 bp, Homo sapiens
ggtgatacaaagaaa

SEQ ID NO: 176005 - DNA, 15 bp, Homo sapiens
gtgatacaaagaaaa

SEQ ID NO: 176006 - DNA, 15 bp, Homo sapiens
tgatacaaagaaaaa

SEQ ID NO: 176007 - DNA, 15 bp, Homo sapiens
gatacaaagaaaaaa

SEQ ID NO: 176008 - DNA, 15 bp, Homo sapiens
atacaaagaaaaaat

SEQ ID NO: 176009 - DNA, 15 bp, Homo sapiens
tacaaagaaaaaata

SEQ ID NO: 176010 - DNA, 15 bp, Homo sapiens
acaaagaaaaaataa

SEQ ID NO: 176011 - DNA, 15 bp, Homo sapiens
caaagaaaaaataaa

SEQ ID NO: 176012 - DNA, 15 bp, Homo sapiens
aaagaaaaaataaaa

SEQ ID NO: 176013 - DNA, 15 bp, Homo sapiens
aagaaaaaataaaag

SEQ ID NO: 176014 - DNA, 15 bp, Homo sapiens
agaaaaaataaaagt

SEQ ID NO: 176015 - DNA, 15 bp, Homo sapiens
gaaaaaataaaagtt

SEQ ID NO: 176016 - DNA, 15 bp, Homo sapiens
aaaaaataaaagtta

SEQ ID NO: 176017 - DNA, 15 bp, Homo sapiens
aaaaataaaagttag

SEQ ID NO: 176018 - DNA, 15 bp, Homo sapiens
aaaataaaagttagt

SEQ ID NO: 176019 - DNA, 15 bp, Homo sapiens
aaataaaagttagta

SEQ ID NO: 176020 - DNA, 15 bp, Homo sapiens
aataaaagttagtat

SEQ ID NO: 176021 - DNA, 15 bp, Homo sapiens
ataaaagttagtata

SEQ ID NO: 176022 - DNA, 15 bp, Homo sapiens
taaaagttagtataa

SEQ ID NO: 176023 - DNA, 15 bp, Homo sapiens
aaaagttagtataat

SEQ ID NO: 176024 - DNA, 15 bp, Homo sapiens
aaagttagtataatc

SEQ ID NO: 176025 - DNA, 15 bp, Homo sapiens
aagttagtataatct

SEQ ID NO: 176026 - DNA, 15 bp, Homo sapiens
agttagtataatctt

SEQ ID NO: 176027 - DNA, 15 bp, Homo sapiens
gttagtataatctta

SEQ ID NO: 176028 - DNA, 15 bp, Homo sapiens
ttagtataatcttaa

SEQ ID NO: 176029 - DNA, 15 bp, Homo sapiens
tagtataatcttaac

SEQ ID NO: 176030 - DNA, 15 bp, Homo sapiens
agtataatcttaact

SEQ ID NO: 176031 - DNA, 15 bp, Homo sapiens
gtataatcttaactg

SEQ ID NO: 176032 - DNA, 15 bp, Homo sapiens
tataatcttaactgc

SEQ ID NO: 176033 - DNA, 15 bp, Homo sapiens
ataatcttaactgcc

SEQ ID NO: 176034 - DNA, 15 bp, Homo sapiens
taatcttaactgcct

SEQ ID NO: 176035 - DNA, 15 bp, Homo sapiens
aatcttaactgccta

SEQ ID NO: 176036 - DNA, 15 bp, Homo sapiens
atcttaactgcctag

SEQ ID NO: 176037 - DNA, 15 bp, Homo sapiens
tcttaactgcctaga

SEQ ID NO: 176038 - DNA, 15 bp, Homo sapiens
cttaactgcctagat

SEQ ID NO: 176039 - DNA, 15 bp, Homo sapiens
ttaactgcctagata

SEQ ID NO: 176040 - DNA, 15 bp, Homo sapiens
taactgcctagataa

SEQ ID NO: 176041 - DNA, 15 bp, Homo sapiens
aactgcctagataaa

SEQ ID NO: 176042 - DNA, 15 bp, Homo sapiens
actgcctagataaac

SEQ ID NO: 176043 - DNA, 15 bp, Homo sapiens
ctgcctagataaacc

SEQ ID NO: 176044 - DNA, 15 bp, Homo sapiens
tgcctagataaacct

SEQ ID NO: 176045 - DNA, 15 bp, Homo sapiens
gcctagataaacctt

SEQ ID NO: 176046 - DNA, 15 bp, Homo sapiens
cctagataaaccttt

SEQ ID NO: 176047 - DNA, 15 bp, Homo sapiens
ctagataaaccttta

SEQ ID NO: 176048 - DNA, 15 bp, Homo sapiens
tagataaacctttat

SEQ ID NO: 176049 - DNA, 15 bp, Homo sapiens
agataaacctttatc

SEQ ID NO: 176050 - DNA, 15 bp, Homo sapiens
gataaacctttatca

SEQ ID NO: 176051 - DNA, 15 bp, Homo sapiens
ataaacctttatcaa

SEQ ID NO: 176052 - DNA, 15 bp, Homo sapiens
taaacctttatcaac

SEQ ID NO: 176053 - DNA, 15 bp, Homo sapiens
aaacctttatcaaca

SEQ ID NO: 176054 - DNA, 15 bp, Homo sapiens
aacctttatcaacat

SEQ ID NO: 176055 - DNA, 15 bp, Homo sapiens
acctttatcaacata

SEQ ID NO: 176056 - DNA, 15 bp, Homo sapiens
cctttatcaacatat

SEQ ID NO: 176057 - DNA, 15 bp, Homo sapiens
ctttatcaacatatg

SEQ ID NO: 176058 - DNA, 15 bp, Homo sapiens
tttatcaacatatgg

SEQ ID NO: 176059 - DNA, 15 bp, Homo sapiens
ttatcaacatatggt

SEQ ID NO: 176060 - DNA, 15 bp, Homo sapiens
tatcaacatatggtg

SEQ ID NO: 176061 - DNA, 15 bp, Homo sapiens
atcaacatatggtgt

SEQ ID NO: 176062 - DNA, 15 bp, Homo sapiens
tcaacatatggtgtg

SEQ ID NO: 176063 - DNA, 15 bp, Homo sapiens
caacatatggtgtgt

SEQ ID NO: 176064 - DNA, 15 bp, Homo sapiens
aacatatggtgtgtt

SEQ ID NO: 176065 - DNA, 15 bp, Homo sapiens
acatatggtgtgttt

SEQ ID NO: 176066 - DNA, 15 bp, Homo sapiens
catatggtgtgtttc

SEQ ID NO: 176067 - DNA, 15 bp, Homo sapiens
atatggtgtgtttcc

SEQ ID NO: 176068 - DNA, 15 bp, Homo sapiens
tatggtgtgtttcct

SEQ ID NO: 176069 - DNA, 15 bp, Homo sapiens
atggtgtgtttcctt

SEQ ID NO: 176070 - DNA, 15 bp, Homo sapiens
tggtgtgtttccttt

SEQ ID NO: 176071 - DNA, 15 bp, Homo sapiens
ggtgtgtttccttta

SEQ ID NO: 176072 - DNA, 15 bp, Homo sapiens
gtgtgtttcctttaa

SEQ ID NO: 176073 - DNA, 15 bp, Homo sapiens
tgtgtttcctttaaa

SEQ ID NO: 176074 - DNA, 15 bp, Homo sapiens
gtgtttcctttaaaa

SEQ ID NO: 176075 - DNA, 15 bp, Homo sapiens
tgtttcctttaaaaa

SEQ ID NO: 176076 - DNA, 15 bp, Homo sapiens
gtttcctttaaaaaa

SEQ ID NO: 176077 - DNA, 15 bp, Homo sapiens
tttcctttaaaaaaa

SEQ ID NO: 176078 - DNA, 15 bp, Homo sapiens
ttcctttaaaaaaaa

SEQ ID NO: 176079 - DNA, 15 bp, Homo sapiens
tcctttaaaaaaaat

SEQ ID NO: 176080 - DNA, 15 bp, Homo sapiens
cctttaaaaaaaatt

SEQ ID NO: 176081 - DNA, 15 bp, Homo sapiens
ctttaaaaaaaatta

SEQ ID NO: 176082 - DNA, 15 bp, Homo sapiens
tttaaaaaaaattag

SEQ ID NO: 176083 - DNA, 15 bp, Homo sapiens
ttaaaaaaaattagt

SEQ ID NO: 176084 - DNA, 15 bp, Homo sapiens
taaaaaaaattagta

SEQ ID NO: 176085 - DNA, 15 bp, Homo sapiens
aaaaaaaattagtaa

SEQ ID NO: 176086 - DNA, 15 bp, Homo sapiens
aaaaaaattagtaaa

SEQ ID NO: 176087 - DNA, 15 bp, Homo sapiens
aaaaaattagtaaac

SEQ ID NO: 176088 - DNA, 15 bp, Homo sapiens
aaaaattagtaaacc

SEQ ID NO: 176089 - DNA, 15 bp, Homo sapiens
aaaattagtaaacca

SEQ ID NO: 176090 - DNA, 15 bp, Homo sapiens
aaattagtaaaccaa

SEQ ID NO: 176091 - DNA, 15 bp, Homo sapiens
aattagtaaaccaaa

SEQ ID NO: 176092 - DNA, 15 bp, Homo sapiens
attagtaaaccaaat

SEQ ID NO: 176093 - DNA, 15 bp, Homo sapiens
ttagtaaaccaaatt

SEQ ID NO: 176094 - DNA, 15 bp, Homo sapiens
tagtaaaccaaatta

SEQ ID NO: 176095 - DNA, 15 bp, Homo sapiens
agtaaaccaaattag

SEQ ID NO: 176096 - DNA, 15 bp, Homo sapiens
gtaaaccaaattagg

SEQ ID NO: 176097 - DNA, 15 bp, Homo sapiens
taaaccaaattaggg

SEQ ID NO: 176098 - DNA, 15 bp, Homo sapiens
aaaccaaattagggt

SEQ ID NO: 176099 - DNA, 15 bp, Homo sapiens
aaccaaattagggtc

SEQ ID NO: 176100 - DNA, 15 bp, Homo sapiens
accaaattagggtct

SEQ ID NO: 176101 - DNA, 15 bp, Homo sapiens
ccaaattagggtctt

SEQ ID NO: 176102 - DNA, 15 bp, Homo sapiens
caaattagggtctta

SEQ ID NO: 176103 - DNA, 15 bp, Homo sapiens
aaattagggtcttag

SEQ ID NO: 176104 - DNA, 15 bp, Homo sapiens
aattagggtcttagt

SEQ ID NO: 176105 - DNA, 15 bp, Homo sapiens
attagggtcttagtg

SEQ ID NO: 176106 - DNA, 15 bp, Homo sapiens
ttagggtcttagtgt

SEQ ID NO: 176107 - DNA, 15 bp, Homo sapiens
tagggtcttagtgta

SEQ ID NO: 176108 - DNA, 15 bp, Homo sapiens
agggtcttagtgtat

SEQ ID NO: 176109 - DNA, 15 bp, Homo sapiens
gggtcttagtgtata

SEQ ID NO: 176110 - DNA, 15 bp, Homo sapiens
ggtcttagtgtatat

SEQ ID NO: 176111 - DNA, 15 bp, Homo sapiens
gtcttagtgtatatt

SEQ ID NO: 176112 - DNA, 15 bp, Homo sapiens
tcttagtgtatatta

SEQ ID NO: 176113 - DNA, 15 bp, Homo sapiens
cttagtgtatattat

SEQ ID NO: 176114 - DNA, 15 bp, Homo sapiens
ttagtgtatattata

SEQ ID NO: 176115 - DNA, 15 bp, Homo sapiens
tagtgtatattatac

SEQ ID NO: 176116 - DNA, 15 bp, Homo sapiens
agtgtatattatact

SEQ ID NO: 176117 - DNA, 15 bp, Homo sapiens
gtgtatattatactt

SEQ ID NO: 176118 - DNA, 15 bp, Homo sapiens
tgtatattatactta

SEQ ID NO: 176119 - DNA, 15 bp, Homo sapiens
gtatattatacttag

SEQ ID NO: 176120 - DNA, 15 bp, Homo sapiens
tatattatacttagt

SEQ ID NO: 176121 - DNA, 15 bp, Homo sapiens
atattatacttagta

SEQ ID NO: 176122 - DNA, 15 bp, Homo sapiens
tattatacttagtaa

SEQ ID NO: 176123 - DNA, 15 bp, Homo sapiens
attatacttagtaac

SEQ ID NO: 176124 - DNA, 15 bp, Homo sapiens
ttatacttagtaaca

SEQ ID NO: 176125 - DNA, 15 bp, Homo sapiens
tatacttagtaacag

SEQ ID NO: 176126 - DNA, 15 bp, Homo sapiens
atacttagtaacaga

SEQ ID NO: 176127 - DNA, 15 bp, Homo sapiens
tacttagtaacagat

SEQ ID NO: 176128 - DNA, 15 bp, Homo sapiens
acttagtaacagatt

SEQ ID NO: 176129 - DNA, 15 bp, Homo sapiens
cttagtaacagattt

SEQ ID NO: 176130 - DNA, 15 bp, Homo sapiens
ttagtaacagatttt

SEQ ID NO: 176131 - DNA, 15 bp, Homo sapiens
tagtaacagattttt

SEQ ID NO: 176132 - DNA, 15 bp, Homo sapiens
agtaacagatttttt

SEQ ID NO: 176133 - DNA, 15 bp, Homo sapiens
gtaacagatttttta

SEQ ID NO: 176134 - DNA, 15 bp, Homo sapiens
taacagattttttaa

SEQ ID NO: 176135 - DNA, 15 bp, Homo sapiens
aacagattttttaaa

SEQ ID NO: 176136 - DNA, 15 bp, Homo sapiens
acagattttttaaaa

SEQ ID NO: 176137 - DNA, 15 bp, Homo sapiens
cagattttttaaaat

SEQ ID NO: 176138 - DNA, 15 bp, Homo sapiens
agattttttaaaatg

SEQ ID NO: 176139 - DNA, 15 bp, Homo sapiens
gattttttaaaatgc

SEQ ID NO: 176140 - DNA, 15 bp, Homo sapiens
attttttaaaatgct

SEQ ID NO: 176141 - DNA, 15 bp, Homo sapiens
ttttttaaaatgctg

SEQ ID NO: 176142 - DNA, 15 bp, Homo sapiens
tttttaaaatgctgc

SEQ ID NO: 176143 - DNA, 15 bp, Homo sapiens
ttttaaaatgctgca

SEQ ID NO: 176144 - DNA, 15 bp, Homo sapiens
tttaaaatgctgcaa

SEQ ID NO: 176145 - DNA, 15 bp, Homo sapiens
ttaaaatgctgcaac

SEQ ID NO: 176146 - DNA, 15 bp, Homo sapiens
taaaatgctgcaaca

SEQ ID NO: 176147 - DNA, 15 bp, Homo sapiens
aaaatgctgcaacaa

SEQ ID NO: 176148 - DNA, 15 bp, Homo sapiens
aaatgctgcaacaat

SEQ ID NO: 176149 - DNA, 15 bp, Homo sapiens
aatgctgcaacaatg

SEQ ID NO: 176150 - DNA, 15 bp, Homo sapiens
atgctgcaacaatgt

SEQ ID NO: 176151 - DNA, 15 bp, Homo sapiens
tgctgcaacaatgtg

SEQ ID NO: 176152 - DNA, 15 bp, Homo sapiens
gctgcaacaatgtga

SEQ ID NO: 176153 - DNA, 15 bp, Homo sapiens
ctgcaacaatgtgag

SEQ ID NO: 176154 - DNA, 15 bp, Homo sapiens
tgcaacaatgtgaga

SEQ ID NO: 176155 - DNA, 15 bp, Homo sapiens
gcaacaatgtgagaa

SEQ ID NO: 176156 - DNA, 15 bp, Homo sapiens
caacaatgtgagaat

SEQ ID NO: 176157 - DNA, 15 bp, Homo sapiens
aacaatgtgagaatt

SEQ ID NO: 176158 - DNA, 15 bp, Homo sapiens
acaatgtgagaattt

SEQ ID NO: 176159 - DNA, 15 bp, Homo sapiens
caatgtgagaatttt

SEQ ID NO: 176160 - DNA, 15 bp, Homo sapiens
aatgtgagaattttc

SEQ ID NO: 176161 - DNA, 15 bp, Homo sapiens
atgtgagaattttct

SEQ ID NO: 176162 - DNA, 15 bp, Homo sapiens
tgtgagaattttcta

SEQ ID NO: 176163 - DNA, 15 bp, Homo sapiens
gtgagaattttctat

SEQ ID NO: 176164 - DNA, 15 bp, Homo sapiens
tgagaattttctatg

SEQ ID NO: 176165 - DNA, 15 bp, Homo sapiens
gagaattttctatgt

SEQ ID NO: 176166 - DNA, 15 bp, Homo sapiens
agaattttctatgtc

SEQ ID NO: 176167 - DNA, 15 bp, Homo sapiens
gaattttctatgtca

SEQ ID NO: 176168 - DNA, 15 bp, Homo sapiens
aattttctatgtcaa

SEQ ID NO: 176169 - DNA, 15 bp, Homo sapiens
attttctatgtcaat

SEQ ID NO: 176170 - DNA, 15 bp, Homo sapiens
ttttctatgtcaatg

SEQ ID NO: 176171 - DNA, 15 bp, Homo sapiens
tttctatgtcaatga

SEQ ID NO: 176172 - DNA, 15 bp, Homo sapiens
ttctatgtcaatgat

SEQ ID NO: 176173 - DNA, 15 bp, Homo sapiens
tctatgtcaatgata

SEQ ID NO: 176174 - DNA, 15 bp, Homo sapiens
ctatgtcaatgatat

SEQ ID NO: 176175 - DNA, 15 bp, Homo sapiens
tatgtcaatgatatt

SEQ ID NO: 176176 - DNA, 15 bp, Homo sapiens
atgtcaatgatatta

SEQ ID NO: 176177 - DNA, 15 bp, Homo sapiens
tgtcaatgatattaa

SEQ ID NO: 176178 - DNA, 15 bp, Homo sapiens
gtcaatgatattaat

SEQ ID NO: 176179 - DNA, 15 bp, Homo sapiens
tcaatgatattaatt

SEQ ID NO: 176180 - DNA, 15 bp, Homo sapiens
caatgatattaattt

SEQ ID NO: 176181 - DNA, 15 bp, Homo sapiens
aatgatattaatttt

SEQ ID NO: 176182 - DNA, 15 bp, Homo sapiens
atgatattaattttg

SEQ ID NO: 176183 - DNA, 15 bp, Homo sapiens
tgatattaattttga

SEQ ID NO: 176184 - DNA, 15 bp, Homo sapiens
gatattaattttgaa

SEQ ID NO: 176185 - DNA, 15 bp, Homo sapiens
atattaattttgaat

SEQ ID NO: 176186 - DNA, 15 bp, Homo sapiens
tattaattttgaatg

SEQ ID NO: 176187 - DNA, 15 bp, Homo sapiens
attaattttgaatga

SEQ ID NO: 176188 - DNA, 15 bp, Homo sapiens
ttaattttgaatgac

SEQ ID NO: 176189 - DNA, 15 bp, Homo sapiens
taattttgaatgaca

SEQ ID NO: 176190 - DNA, 15 bp, Homo sapiens
aattttgaatgacaa

SEQ ID NO: 176191 - DNA, 15 bp, Homo sapiens
attttgaatgacaaa

SEQ ID NO: 176192 - DNA, 15 bp, Homo sapiens
ttttgaatgacaaag

SEQ ID NO: 176193 - DNA, 15 bp, Homo sapiens
tttgaatgacaaaga

SEQ ID NO: 176194 - DNA, 15 bp, Homo sapiens
ttgaatgacaaagac

SEQ ID NO: 176195 - DNA, 15 bp, Homo sapiens
tgaatgacaaagaca

SEQ ID NO: 176196 - DNA, 15 bp, Homo sapiens
gaatgacaaagacac

SEQ ID NO: 176197 - DNA, 15 bp, Homo sapiens
aatgacaaagacacc

SEQ ID NO: 176198 - DNA, 15 bp, Homo sapiens
atgacaaagacacca

SEQ ID NO: 176199 - DNA, 15 bp, Homo sapiens
tgacaaagacaccaa

SEQ ID NO: 176200 - DNA, 15 bp, Homo sapiens
gacaaagacaccaaa

SEQ ID NO: 176201 - DNA, 15 bp, Homo sapiens
acaaagacaccaaaa

SEQ ID NO: 176202 - DNA, 15 bp, Homo sapiens
caaagacaccaaaaa

SEQ ID NO: 176203 - DNA, 15 bp, Homo sapiens
aaagacaccaaaaac

SEQ ID NO: 176204 - DNA, 15 bp, Homo sapiens
aagacaccaaaaaca

SEQ ID NO: 176205 - DNA, 15 bp, Homo sapiens
agacaccaaaaacaa

SEQ ID NO: 176206 - DNA, 15 bp, Homo sapiens
gacaccaaaaacaat

SEQ ID NO: 176207 - DNA, 15 bp, Homo sapiens
acaccaaaaacaatc

SEQ ID NO: 176208 - DNA, 15 bp, Homo sapiens
caccaaaaacaatca

SEQ ID NO: 176209 - DNA, 15 bp, Homo sapiens
accaaaaacaatcat

SEQ ID NO: 176210 - DNA, 15 bp, Homo sapiens
ccaaaaacaatcatg

SEQ ID NO: 176211 - DNA, 15 bp, Homo sapiens
caaaaacaatcatga

SEQ ID NO: 176212 - DNA, 15 bp, Homo sapiens
aaaaacaatcatgat

SEQ ID NO: 176213 - DNA, 15 bp, Homo sapiens
aaaacaatcatgata

SEQ ID NO: 176214 - DNA, 15 bp, Homo sapiens
aaacaatcatgataa

SEQ ID NO: 176215 - DNA, 15 bp, Homo sapiens
aacaatcatgataaa

SEQ ID NO: 176216 - DNA, 15 bp, Homo sapiens
acaatcatgataaaa

SEQ ID NO: 176217 - DNA, 15 bp, Homo sapiens
caatcatgataaaaa

SEQ ID NO: 176218 - DNA, 15 bp, Homo sapiens
aatcatgataaaaac

SEQ ID NO: 176219 - DNA, 15 bp, Homo sapiens
atcatgataaaaaca

SEQ ID NO: 176220 - DNA, 15 bp, Homo sapiens
tcatgataaaaacaa

SEQ ID NO: 176221 - DNA, 15 bp, Homo sapiens
catgataaaaacaaa

SEQ ID NO: 176222 - DNA, 15 bp, Homo sapiens
atgataaaaacaaaa

SEQ ID NO: 176223 - DNA, 15 bp, Homo sapiens
tgataaaaacaaaaa

SEQ ID NO: 176224 - DNA, 15 bp, Homo sapiens
gataaaaacaaaaat

SEQ ID NO: 176225 - DNA, 15 bp, Homo sapiens
ataaaaacaaaaatt

SEQ ID NO: 176226 - DNA, 15 bp, Homo sapiens
taaaaacaaaaattg

SEQ ID NO: 176227 - DNA, 15 bp, Homo sapiens
aaaaacaaaaattga

SEQ ID NO: 176228 - DNA, 15 bp, Homo sapiens
aaaacaaaaattgac

SEQ ID NO: 176229 - DNA, 15 bp, Homo sapiens
aaacaaaaattgaca

SEQ ID NO: 176230 - DNA, 15 bp, Homo sapiens
aacaaaaattgacaa

SEQ ID NO: 176231 - DNA, 15 bp, Homo sapiens
acaaaaattgacaaa

SEQ ID NO: 176232 - DNA, 15 bp, Homo sapiens
caaaaattgacaaat

SEQ ID NO: 176233 - DNA, 15 bp, Homo sapiens
aaaaattgacaaatg

SEQ ID NO: 176234 - DNA, 15 bp, Homo sapiens
aaaattgacaaatgg

SEQ ID NO: 176235 - DNA, 15 bp, Homo sapiens
aaattgacaaatggt

SEQ ID NO: 176236 - DNA, 15 bp, Homo sapiens
aattgacaaatggta

SEQ ID NO: 176237 - DNA, 15 bp, Homo sapiens
attgacaaatggtat

SEQ ID NO: 176238 - DNA, 15 bp, Homo sapiens
ttgacaaatggtatc

SEQ ID NO: 176239 - DNA, 15 bp, Homo sapiens
tgacaaatggtatct

SEQ ID NO: 176240 - DNA, 15 bp, Homo sapiens
gacaaatggtatcta

SEQ ID NO: 176241 - DNA, 15 bp, Homo sapiens
acaaatggtatctaa

SEQ ID NO: 176242 - DNA, 15 bp, Homo sapiens
caaatggtatctaat

SEQ ID NO: 176243 - DNA, 15 bp, Homo sapiens
aaatggtatctaatt

SEQ ID NO: 176244 - DNA, 15 bp, Homo sapiens
aatggtatctaatta

SEQ ID NO: 176245 - DNA, 15 bp, Homo sapiens
atggtatctaattac

SEQ ID NO: 176246 - DNA, 15 bp, Homo sapiens
tggtatctaattaca

SEQ ID NO: 176247 - DNA, 15 bp, Homo sapiens
ggtatctaattacac

SEQ ID NO: 176248 - DNA, 15 bp, Homo sapiens
gtatctaattacact

SEQ ID NO: 176249 - DNA, 15 bp, Homo sapiens
tatctaattacactt

SEQ ID NO: 176250 - DNA, 15 bp, Homo sapiens
atctaattacactta

SEQ ID NO: 176251 - DNA, 15 bp, Homo sapiens
tctaattacacttaa

SEQ ID NO: 176252 - DNA, 15 bp, Homo sapiens
ctaattacacttaag

SEQ ID NO: 176253 - DNA, 15 bp, Homo sapiens
taattacacttaaga

SEQ ID NO: 176254 - DNA, 15 bp, Homo sapiens
aattacacttaagag

SEQ ID NO: 176255 - DNA, 15 bp, Homo sapiens
attacacttaagagc

SEQ ID NO: 176256 - DNA, 15 bp, Homo sapiens
ttacacttaagagct

SEQ ID NO: 176257 - DNA, 15 bp, Homo sapiens
tacacttaagagctt

SEQ ID NO: 176258 - DNA, 15 bp, Homo sapiens
acacttaagagcttc

SEQ ID NO: 176259 - DNA, 15 bp, Homo sapiens
cacttaagagcttct

SEQ ID NO: 176260 - DNA, 15 bp, Homo sapiens
acttaagagcttctg

SEQ ID NO: 176261 - DNA, 15 bp, Homo sapiens
cttaagagcttctgc

SEQ ID NO: 176262 - DNA, 15 bp, Homo sapiens
ttaagagcttctgca

SEQ ID NO: 176263 - DNA, 15 bp, Homo sapiens
taagagcttctgcac

SEQ ID NO: 176264 - DNA, 15 bp, Homo sapiens
aagagcttctgcaca

SEQ ID NO: 176265 - DNA, 15 bp, Homo sapiens
agagcttctgcacag

SEQ ID NO: 176266 - DNA, 15 bp, Homo sapiens
gagcttctgcacagc

SEQ ID NO: 176267 - DNA, 15 bp, Homo sapiens
agcttctgcacagca

SEQ ID NO: 176268 - DNA, 15 bp, Homo sapiens
gcttctgcacagcaa

SEQ ID NO: 176269 - DNA, 15 bp, Homo sapiens
cttctgcacagcaaa

SEQ ID NO: 176270 - DNA, 15 bp, Homo sapiens
ttctgcacagcaaaa

SEQ ID NO: 176271 - DNA, 15 bp, Homo sapiens
tctgcacagcaaaaa

SEQ ID NO: 176272 - DNA, 15 bp, Homo sapiens
ctgcacagcaaaaaa

SEQ ID NO: 176273 - DNA, 15 bp, Homo sapiens
tgcacagcaaaaaaa

SEQ ID NO: 176274 - DNA, 15 bp, Homo sapiens
gcacagcaaaaaaaa

SEQ ID NO: 176275 - DNA, 15 bp, Homo sapiens
cacagcaaaaaaaaa

SEQ ID NO: 176276 - DNA, 15 bp, Homo sapiens
acagcaaaaaaaaaa

SEQ ID NO: 176277 - DNA, 15 bp, Homo sapiens
cagcaaaaaaaaaaa

SEQ ID NO: 176278 - DNA, 15 bp, Homo sapiens
agcaaaaaaaaaaac

SEQ ID NO: 176279 - DNA, 15 bp, Homo sapiens
gcaaaaaaaaaaaca

SEQ ID NO: 176280 - DNA, 15 bp, Homo sapiens
caaaaaaaaaaacaa

SEQ ID NO: 176281 - DNA, 15 bp, Homo sapiens
aaacaaaaaaaaaac

SEQ ID NO: 176282 - DNA, 15 bp, Homo sapiens
aacaaaaaaaaaact

SEQ ID NO: 176283 - DNA, 15 bp, Homo sapiens
acaaaaaaaaaactg

SEQ ID NO: 176284 - DNA, 15 bp, Homo sapiens
caaaaaaaaaactgt

SEQ ID NO: 176285 - DNA, 15 bp, Homo sapiens
aaaaaaaaaactgtc

SEQ ID NO: 176286 - DNA, 15 bp, Homo sapiens
aaaaaaaaactgtca

SEQ ID NO: 176287 - DNA, 15 bp, Homo sapiens
aaaaaaactgtcaac

SEQ ID NO: 176288 - DNA, 15 bp, Homo sapiens
aaaaaactgtcaaca

SEQ ID NO: 176289 - DNA, 15 bp, Homo sapiens
aaaaactgtcaacag

SEQ ID NO: 176290 - DNA, 15 bp, Homo sapiens
aaaactgtcaacaga

SEQ ID NO: 176291 - DNA, 15 bp, Homo sapiens
aaactgtcaacagag

SEQ ID NO: 176292 - DNA, 15 bp, Homo sapiens
aactgtcaacagagt

SEQ ID NO: 176293 - DNA, 15 bp, Homo sapiens
actgtcaacagagta

SEQ ID NO: 176294 - DNA, 15 bp, Homo sapiens
ctgtcaacagagtaa

SEQ ID NO: 176295 - DNA, 15 bp, Homo sapiens
tgtcaacagagtaaa

SEQ ID NO: 176296 - DNA, 15 bp, Homo sapiens
gtcaacagagtaaac

SEQ ID NO: 176297 - DNA, 15 bp, Homo sapiens
tcaacagagtaaaca

SEQ ID NO: 176298 - DNA, 15 bp, Homo sapiens
caacagagtaaacag

SEQ ID NO: 176299 - DNA, 15 bp, Homo sapiens
aacagagtaaacaga

SEQ ID NO: 176300 - DNA, 15 bp, Homo sapiens
acagagtaaacagac

SEQ ID NO: 176301 - DNA, 15 bp, Homo sapiens
cagagtaaacagaca

SEQ ID NO: 176302 - DNA, 15 bp, Homo sapiens
agagtaaacagacaa

SEQ ID NO: 176303 - DNA, 15 bp, Homo sapiens
gagtaaacagacaac

SEQ ID NO: 176304 - DNA, 15 bp, Homo sapiens
agtaaacagacaacc

SEQ ID NO: 176305 - DNA, 15 bp, Homo sapiens
gtaaacagacaacct

SEQ ID NO: 176306 - DNA, 15 bp, Homo sapiens
taaacagacaacctc

SEQ ID NO: 176307 - DNA, 15 bp, Homo sapiens
aaacagacaacctcc

SEQ ID NO: 176308 - DNA, 15 bp, Homo sapiens
aacagacaacctcca

SEQ ID NO: 176309 - DNA, 15 bp, Homo sapiens
acagacaacctccag

SEQ ID NO: 176310 - DNA, 15 bp, Homo sapiens
cagacaacctccaga

SEQ ID NO: 176311 - DNA, 15 bp, Homo sapiens
agacaacctccagaa

SEQ ID NO: 176312 - DNA, 15 bp, Homo sapiens
gacaacctccagaat

SEQ ID NO: 176313 - DNA, 15 bp, Homo sapiens
acaacctccagaatg

SEQ ID NO: 176314 - DNA, 15 bp, Homo sapiens
caacctccagaatgg

SEQ ID NO: 176315 - DNA, 15 bp, Homo sapiens
aacctccagaatggg

SEQ ID NO: 176316 - DNA, 15 bp, Homo sapiens
acctccagaatggga

SEQ ID NO: 176317 - DNA, 15 bp, Homo sapiens
cctccagaatgggag

SEQ ID NO: 176318 - DNA, 15 bp, Homo sapiens
ctccagaatgggaga

SEQ ID NO: 176319 - DNA, 15 bp, Homo sapiens
tccagaatgggagaa

SEQ ID NO: 176320 - DNA, 15 bp, Homo sapiens
ccagaatgggagaaa

SEQ ID NO: 176321 - DNA, 15 bp, Homo sapiens
cagaatgggagaaaa

SEQ ID NO: 176322 - DNA, 15 bp, Homo sapiens
agaatgggagaaaat

SEQ ID NO: 176323 - DNA, 15 bp, Homo sapiens
gaatgggagaaaatt

SEQ ID NO: 176324 - DNA, 15 bp, Homo sapiens
aatgggagaaaattt

SEQ ID NO: 176325 - DNA, 15 bp, Homo sapiens
atgggagaaaatttt

SEQ ID NO: 176326 - DNA, 15 bp, Homo sapiens
tgggagaaaattttt

SEQ ID NO: 176327 - DNA, 15 bp, Homo sapiens
gggagaaaatttttg

SEQ ID NO: 176328 - DNA, 15 bp, Homo sapiens
ggagaaaatttttgc

SEQ ID NO: 176329 - DNA, 15 bp, Homo sapiens
gagaaaatttttgca

SEQ ID NO: 176330 - DNA, 15 bp, Homo sapiens
agaaaatttttgcaa

SEQ ID NO: 176331 - DNA, 15 bp, Homo sapiens
gaaaatttttgcaaa

SEQ ID NO: 176332 - DNA, 15 bp, Homo sapiens
aaaatttttgcaaac

SEQ ID NO: 176333 - DNA, 15 bp, Homo sapiens
aaatttttgcaaact

SEQ ID NO: 176334 - DNA, 15 bp, Homo sapiens
aatttttgcaaacta

SEQ ID NO: 176335 - DNA, 15 bp, Homo sapiens
atttttgcaaactac

SEQ ID NO: 176336 - DNA, 15 bp, Homo sapiens
tttttgcaaactacg

SEQ ID NO: 176337 - DNA, 15 bp, Homo sapiens
ttttgcaaactacgc

SEQ ID NO: 176338 - DNA, 15 bp, Homo sapiens
tttgcaaactacgca

SEQ ID NO: 176339 - DNA, 15 bp, Homo sapiens
ttgcaaactacgcat

SEQ ID NO: 176340 - DNA, 15 bp, Homo sapiens
tgcaaactacgcatc

SEQ ID NO: 176341 - DNA, 15 bp, Homo sapiens
gcaaactacgcatct

SEQ ID NO: 176342 - DNA, 15 bp, Homo sapiens
caaactacgcatctg

SEQ ID NO: 176343 - DNA, 15 bp, Homo sapiens
aaactacgcatctga

SEQ ID NO: 176344 - DNA, 15 bp, Homo sapiens
aactacgcatctgac

SEQ ID NO: 176345 - DNA, 15 bp, Homo sapiens
actacgcatctgaca

SEQ ID NO: 176346 - DNA, 15 bp, Homo sapiens
ctacgcatctgacaa

SEQ ID NO: 176347 - DNA, 15 bp, Homo sapiens
tacgcatctgacaaa

SEQ ID NO: 176348 - DNA, 15 bp, Homo sapiens
acgcatctgacaaag

SEQ ID NO: 176349 - DNA, 15 bp, Homo sapiens
cgcatctgacaaagg

SEQ ID NO: 176350 - DNA, 15 bp, Homo sapiens
gcatctgacaaaggc

SEQ ID NO: 176351 - DNA, 15 bp, Homo sapiens
catctgacaaaggcc

SEQ ID NO: 176352 - DNA, 15 bp, Homo sapiens
atctgacaaaggcct

SEQ ID NO: 176353 - DNA, 15 bp, Homo sapiens
tctgacaaaggccta

SEQ ID NO: 176354 - DNA, 15 bp, Homo sapiens
ctgacaaaggcctaa

SEQ ID NO: 176355 - DNA, 15 bp, Homo sapiens
tgacaaaggcctaat

SEQ ID NO: 176356 - DNA, 15 bp, Homo sapiens
gacaaaggcctaata

SEQ ID NO: 176357 - DNA, 15 bp, Homo sapiens
acaaaggcctaatat

SEQ ID NO: 176358 - DNA, 15 bp, Homo sapiens
caaaggcctaatatc

SEQ ID NO: 176359 - DNA, 15 bp, Homo sapiens
aaaggcctaatatcc

SEQ ID NO: 176360 - DNA, 15 bp, Homo sapiens
aaggcctaatatcca

SEQ ID NO: 176361 - DNA, 15 bp, Homo sapiens
aggcctaatatccag

SEQ ID NO: 176362 - DNA, 15 bp, Homo sapiens
ggcctaatatccagc

SEQ ID NO: 176363 - DNA, 15 bp, Homo sapiens
gcctaatatccagcc

SEQ ID NO: 176364 - DNA, 15 bp, Homo sapiens
cctaatatccagcct

SEQ ID NO: 176365 - DNA, 15 bp, Homo sapiens
ctaatatccagcctc

SEQ ID NO: 176366 - DNA, 15 bp, Homo sapiens
taatatccagcctct

SEQ ID NO: 176367 - DNA, 15 bp, Homo sapiens
aatatccagcctcta

SEQ ID NO: 176368 - DNA, 15 bp, Homo sapiens
atatccagcctctat

SEQ ID NO: 176369 - DNA, 15 bp, Homo sapiens
tatccagcctctata

SEQ ID NO: 176370 - DNA, 15 bp, Homo sapiens
atccagcctctataa

SEQ ID NO: 176371 - DNA, 15 bp, Homo sapiens
tccagcctctataag

SEQ ID NO: 176372 - DNA, 15 bp, Homo sapiens
ccagcctctataagg

SEQ ID NO: 176373 - DNA, 15 bp, Homo sapiens
cagcctctataagga

SEQ ID NO: 176374 - DNA, 15 bp, Homo sapiens
agcctctataaggaa

SEQ ID NO: 176375 - DNA, 15 bp, Homo sapiens
gcctctataaggaac

SEQ ID NO: 176376 - DNA, 15 bp, Homo sapiens
cctctataaggaact

SEQ ID NO: 176377 - DNA, 15 bp, Homo sapiens
ctctataaggaactt

SEQ ID NO: 176378 - DNA, 15 bp, Homo sapiens
tctataaggaactta

SEQ ID NO: 176379 - DNA, 15 bp, Homo sapiens
ctataaggaacttaa

SEQ ID NO: 176380 - DNA, 15 bp, Homo sapiens
tataaggaacttaaa

SEQ ID NO: 176381 - DNA, 15 bp, Homo sapiens
ataaggaacttaaac

SEQ ID NO: 176382 - DNA, 15 bp, Homo sapiens
taaggaacttaaaca

SEQ ID NO: 176383 - DNA, 15 bp, Homo sapiens
aaggaacttaaacaa

SEQ ID NO: 176384 - DNA, 15 bp, Homo sapiens
aggaacttaaacaag

SEQ ID NO: 176385 - DNA, 15 bp, Homo sapiens
ggaacttaaacaagt

SEQ ID NO: 176386 - DNA, 15 bp, Homo sapiens
gaacttaaacaagtt

SEQ ID NO: 176387 - DNA, 15 bp, Homo sapiens
aacttaaacaagttt

SEQ ID NO: 176388 - DNA, 15 bp, Homo sapiens
acttaaacaagttta

SEQ ID NO: 176389 - DNA, 15 bp, Homo sapiens
cttaaacaagtttat

SEQ ID NO: 176390 - DNA, 15 bp, Homo sapiens
ttaaacaagtttata

SEQ ID NO: 176391 - DNA, 15 bp, Homo sapiens
taaacaagtttataa

SEQ ID NO: 176392 - DNA, 15 bp, Homo sapiens
aaacaagtttataag

SEQ ID NO: 176393 - DNA, 15 bp, Homo sapiens
aacaagtttataaga

SEQ ID NO: 176394 - DNA, 15 bp, Homo sapiens
acaagtttataagag

SEQ ID NO: 176395 - DNA, 15 bp, Homo sapiens
caagtttataagaga

SEQ ID NO: 176396 - DNA, 15 bp, Homo sapiens
aagtttataagagaa

SEQ ID NO: 176397 - DNA, 15 bp, Homo sapiens
agtttataagagaaa

SEQ ID NO: 176398 - DNA, 15 bp, Homo sapiens
gtttataagagaaaa

SEQ ID NO: 176399 - DNA, 15 bp, Homo sapiens
tttataagagaaaaa

SEQ ID NO: 176400 - DNA, 15 bp, Homo sapiens
ttataagagaaaaaa

SEQ ID NO: 176401 - DNA, 15 bp, Homo sapiens
tataagagaaaaaaa

SEQ ID NO: 176402 - DNA, 15 bp, Homo sapiens
ataagagaaaaaaag

SEQ ID NO: 176403 - DNA, 15 bp, Homo sapiens
taagagaaaaaaaga

SEQ ID NO: 176404 - DNA, 15 bp, Homo sapiens
aagagaaaaaaagaa

SEQ ID NO: 176405 - DNA, 15 bp, Homo sapiens
agagaaaaaaagaat

SEQ ID NO: 176406 - DNA, 15 bp, Homo sapiens
gagaaaaaaagaatc

SEQ ID NO: 176407 - DNA, 15 bp, Homo sapiens
agaaaaaaagaatcc

SEQ ID NO: 176408 - DNA, 15 bp, Homo sapiens
gaaaaaaagaatccc

SEQ ID NO: 176409 - DNA, 15 bp, Homo sapiens
aaaaaaagaatccca

SEQ ID NO: 176410 - DNA, 15 bp, Homo sapiens
aaaaaagaatcccat

SEQ ID NO: 176411 - DNA, 15 bp, Homo sapiens
aaaaagaatcccatt

SEQ ID NO: 176412 - DNA, 15 bp, Homo sapiens
aaaagaatcccatta

SEQ ID NO: 176413 - DNA, 15 bp, Homo sapiens
aaagaatcccattaa

SEQ ID NO: 176414 - DNA, 15 bp, Homo sapiens
aagaatcccattaaa

SEQ ID NO: 176415 - DNA, 15 bp, Homo sapiens
agaatcccattaaaa

SEQ ID NO: 176416 - DNA, 15 bp, Homo sapiens
gaatcccattaaaaa

SEQ ID NO: 176417 - DNA, 15 bp, Homo sapiens
aatcccattaaaaag

SEQ ID NO: 176418 - DNA, 15 bp, Homo sapiens
atcccattaaaaagt

SEQ ID NO: 176419 - DNA, 15 bp, Homo sapiens
tcccattaaaaagta

SEQ ID NO: 176420 - DNA, 15 bp, Homo sapiens
cccattaaaaagtag

SEQ ID NO: 176421 - DNA, 15 bp, Homo sapiens
ccattaaaaagtagg

SEQ ID NO: 176422 - DNA, 15 bp, Homo sapiens
cattaaaaagtaggt

SEQ ID NO: 176423 - DNA, 15 bp, Homo sapiens
attaaaaagtaggta

SEQ ID NO: 176424 - DNA, 15 bp, Homo sapiens
ttaaaaagtaggtaa

SEQ ID NO: 176425 - DNA, 15 bp, Homo sapiens
taaaaagtaggtaaa

SEQ ID NO: 176426 - DNA, 15 bp, Homo sapiens
aaaaagtaggtaaag

SEQ ID NO: 176427 - DNA, 15 bp, Homo sapiens
aaaagtaggtaaagg

SEQ ID NO: 176428 - DNA, 15 bp, Homo sapiens
aaagtaggtaaaggg

SEQ ID NO: 176429 - DNA, 15 bp, Homo sapiens
aagtaggtaaagggc

SEQ ID NO: 176430 - DNA, 15 bp, Homo sapiens
agtaggtaaagggca

SEQ ID NO: 176431 - DNA, 15 bp, Homo sapiens
gtaggtaaagggcat

SEQ ID NO: 176432 - DNA, 15 bp, Homo sapiens
taggtaaagggcatg

SEQ ID NO: 176433 - DNA, 15 bp, Homo sapiens
aggtaaagggcatga

SEQ ID NO: 176434 - DNA, 15 bp, Homo sapiens
ggtaaagggcatgaa

SEQ ID NO: 176435 - DNA, 15 bp, Homo sapiens
gtaaagggcatgaat

SEQ ID NO: 176436 - DNA, 15 bp, Homo sapiens
taaagggcatgaata

SEQ ID NO: 176437 - DNA, 15 bp, Homo sapiens
aaagggcatgaatag

SEQ ID NO: 176438 - DNA, 15 bp, Homo sapiens
aagggcatgaatagt

SEQ ID NO: 176439 - DNA, 15 bp, Homo sapiens
agggcatgaatagtc

SEQ ID NO: 176440 - DNA, 15 bp, Homo sapiens
gggcatgaatagtca

SEQ ID NO: 176441 - DNA, 15 bp, Homo sapiens
ggcatgaatagtcac

SEQ ID NO: 176442 - DNA, 15 bp, Homo sapiens
gcatgaatagtcact

SEQ ID NO: 176443 - DNA, 15 bp, Homo sapiens
catgaatagtcactt

SEQ ID NO: 176444 - DNA, 15 bp, Homo sapiens
atgaatagtcacttt

SEQ ID NO: 176445 - DNA, 15 bp, Homo sapiens
tgaatagtcactttt

SEQ ID NO: 176446 - DNA, 15 bp, Homo sapiens
gaatagtcacttttc

SEQ ID NO: 176447 - DNA, 15 bp, Homo sapiens
aatagtcacttttct

SEQ ID NO: 176448 - DNA, 15 bp, Homo sapiens
atagtcacttttcta

SEQ ID NO: 176449 - DNA, 15 bp, Homo sapiens
tagtcacttttctaa

SEQ ID NO: 176450 - DNA, 15 bp, Homo sapiens
agtcacttttctaaa

SEQ ID NO: 176451 - DNA, 15 bp, Homo sapiens
gtcacttttctaaag

SEQ ID NO: 176452 - DNA, 15 bp, Homo sapiens
tcacttttctaaaga

SEQ ID NO: 176453 - DNA, 15 bp, Homo sapiens
cacttttctaaagaa

SEQ ID NO: 176454 - DNA, 15 bp, Homo sapiens
acttttctaaagaag

SEQ ID NO: 176455 - DNA, 15 bp, Homo sapiens
cttttctaaagaaga

SEQ ID NO: 176456 - DNA, 15 bp, Homo sapiens
ttttctaaagaagac

SEQ ID NO: 176457 - DNA, 15 bp, Homo sapiens
tttctaaagaagaca

SEQ ID NO: 176458 - DNA, 15 bp, Homo sapiens
ttctaaagaagacat

SEQ ID NO: 176459 - DNA, 15 bp, Homo sapiens
tctaaagaagacata

SEQ ID NO: 176460 - DNA, 15 bp, Homo sapiens
ctaaagaagacatat

SEQ ID NO: 176461 - DNA, 15 bp, Homo sapiens
taaagaagacatata

SEQ ID NO: 176462 - DNA, 15 bp, Homo sapiens
aaagaagacatatat

SEQ ID NO: 176463 - DNA, 15 bp, Homo sapiens
aagaagacatatatg

SEQ ID NO: 176464 - DNA, 15 bp, Homo sapiens
agaagacatatatga

SEQ ID NO: 176465 - DNA, 15 bp, Homo sapiens
gaagacatatatgag

SEQ ID NO: 176466 - DNA, 15 bp, Homo sapiens
aagacatatatgaga

SEQ ID NO: 176467 - DNA, 15 bp, Homo sapiens
agacatatatgagac

SEQ ID NO: 176468 - DNA, 15 bp, Homo sapiens
gacatatatgagacc

SEQ ID NO: 176469 - DNA, 15 bp, Homo sapiens
acatatatgagacca

SEQ ID NO: 176470 - DNA, 15 bp, Homo sapiens
catatatgagaccaa

SEQ ID NO: 176471 - DNA, 15 bp, Homo sapiens
atatatgagaccaac

SEQ ID NO: 176472 - DNA, 15 bp, Homo sapiens
tatatgagaccaaca

SEQ ID NO: 176473 - DNA, 15 bp, Homo sapiens
atatgagaccaacaa

SEQ ID NO: 176474 - DNA, 15 bp, Homo sapiens
tatgagaccaacaaa

SEQ ID NO: 176475 - DNA, 15 bp, Homo sapiens
atgagaccaacaaac

SEQ ID NO: 176476 - DNA, 15 bp, Homo sapiens
tgagaccaacaaact

SEQ ID NO: 176477 - DNA, 15 bp, Homo sapiens
gagaccaacaaactt

SEQ ID NO: 176478 - DNA, 15 bp, Homo sapiens
agaccaacaaactta

SEQ ID NO: 176479 - DNA, 15 bp, Homo sapiens
gaccaacaaacttat

SEQ ID NO: 176480 - DNA, 15 bp, Homo sapiens
accaacaaacttatg

SEQ ID NO: 176481 - DNA, 15 bp, Homo sapiens
ccaacaaacttatga

SEQ ID NO: 176482 - DNA, 15 bp, Homo sapiens
caacaaacttatgag

SEQ ID NO: 176483 - DNA, 15 bp, Homo sapiens
aacaaacttatgaga

SEQ ID NO: 176484 - DNA, 15 bp, Homo sapiens
acaaacttatgagaa

SEQ ID NO: 176485 - DNA, 15 bp, Homo sapiens
caaacttatgagaaa

SEQ ID NO: 176486 - DNA, 15 bp, Homo sapiens
aaacttatgagaaaa

SEQ ID NO: 176487 - DNA, 15 bp, Homo sapiens
aacttatgagaaaat

SEQ ID NO: 176488 - DNA, 15 bp, Homo sapiens
acttatgagaaaatg

SEQ ID NO: 176489 - DNA, 15 bp, Homo sapiens
cttatgagaaaatgc

SEQ ID NO: 176490 - DNA, 15 bp, Homo sapiens
ttatgagaaaatgct

SEQ ID NO: 176491 - DNA, 15 bp, Homo sapiens
tatgagaaaatgctc

SEQ ID NO: 176492 - DNA, 15 bp, Homo sapiens
atgagaaaatgctca

SEQ ID NO: 176493 - DNA, 15 bp, Homo sapiens
tgagaaaatgctcaa

SEQ ID NO: 176494 - DNA, 15 bp, Homo sapiens
gagaaaatgctcaat

SEQ ID NO: 176495 - DNA, 15 bp, Homo sapiens
agaaaatgctcaata

SEQ ID NO: 176496 - DNA, 15 bp, Homo sapiens
gaaaatgctcaatat

SEQ ID NO: 176497 - DNA, 15 bp, Homo sapiens
aaaatgctcaatatc

SEQ ID NO: 176498 - DNA, 15 bp, Homo sapiens
aaatgctcaatatca

SEQ ID NO: 176499 - DNA, 15 bp, Homo sapiens
aatgctcaatatcac

SEQ ID NO: 176500 - DNA, 15 bp, Homo sapiens
atgctcaatatcact

SEQ ID NO: 176501 - DNA, 15 bp, Homo sapiens
tgctcaatatcactg

SEQ ID NO: 176502 - DNA, 15 bp, Homo sapiens
gctcaatatcactga

SEQ ID NO: 176503 - DNA, 15 bp, Homo sapiens
ctcaatatcactgat

SEQ ID NO: 176504 - DNA, 15 bp, Homo sapiens
tcaatatcactgatc

SEQ ID NO: 176505 - DNA, 15 bp, Homo sapiens
caatatcactgatca

SEQ ID NO: 176506 - DNA, 15 bp, Homo sapiens
aatatcactgatcat

SEQ ID NO: 176507 - DNA, 15 bp, Homo sapiens
atatcactgatcatt

SEQ ID NO: 176508 - DNA, 15 bp, Homo sapiens
tatcactgatcatta

SEQ ID NO: 176509 - DNA, 15 bp, Homo sapiens
atcactgatcattag

SEQ ID NO: 176510 - DNA, 15 bp, Homo sapiens
tcactgatcattaga

SEQ ID NO: 176511 - DNA, 15 bp, Homo sapiens
cactgatcattagag

SEQ ID NO: 176512 - DNA, 15 bp, Homo sapiens
actgatcattagaga

SEQ ID NO: 176513 - DNA, 15 bp, Homo sapiens
ctgatcattagagaa

SEQ ID NO: 176514 - DNA, 15 bp, Homo sapiens
tgatcattagagaat

SEQ ID NO: 176515 - DNA, 15 bp, Homo sapiens
gatcattagagaatg

SEQ ID NO: 176516 - DNA, 15 bp, Homo sapiens
atcattagagaatgc

SEQ ID NO: 176517 - DNA, 15 bp, Homo sapiens
tcattagagaatgca

SEQ ID NO: 176518 - DNA, 15 bp, Homo sapiens
cattagagaatgcaa

SEQ ID NO: 176519 - DNA, 15 bp, Homo sapiens
attagagaatgcaaa

SEQ ID NO: 176520 - DNA, 15 bp, Homo sapiens
ttagagaatgcaaat

SEQ ID NO: 176521 - DNA, 15 bp, Homo sapiens
tagagaatgcaaata

SEQ ID NO: 176522 - DNA, 15 bp, Homo sapiens
agagaatgcaaatat

SEQ ID NO: 176523 - DNA, 15 bp, Homo sapiens
gagaatgcaaatata

SEQ ID NO: 176524 - DNA, 15 bp, Homo sapiens
agaatgcaaatataa

SEQ ID NO: 176525 - DNA, 15 bp, Homo sapiens
gaatgcaaatataaa

SEQ ID NO: 176526 - DNA, 15 bp, Homo sapiens
aatgcaaatataaac

SEQ ID NO: 176527 - DNA, 15 bp, Homo sapiens
atgcaaatataaacc

SEQ ID NO: 176528 - DNA, 15 bp, Homo sapiens
tgcaaatataaacca

SEQ ID NO: 176529 - DNA, 15 bp, Homo sapiens
gcaaatataaaccac

SEQ ID NO: 176530 - DNA, 15 bp, Homo sapiens
caaatataaaccaca

SEQ ID NO: 176531 - DNA, 15 bp, Homo sapiens
aaatataaaccacaa

SEQ ID NO: 176532 - DNA, 15 bp, Homo sapiens
aatataaaccacaat

SEQ ID NO: 176533 - DNA, 15 bp, Homo sapiens
atataaaccacaatt

SEQ ID NO: 176534 - DNA, 15 bp, Homo sapiens
tataaaccacaatta

SEQ ID NO: 176535 - DNA, 15 bp, Homo sapiens
ataaaccacaattag

SEQ ID NO: 176536 - DNA, 15 bp, Homo sapiens
taaaccacaattaga

SEQ ID NO: 176537 - DNA, 15 bp, Homo sapiens
aaaccacaattagat

SEQ ID NO: 176538 - DNA, 15 bp, Homo sapiens
aaccacaattagata

SEQ ID NO: 176539 - DNA, 15 bp, Homo sapiens
accacaattagatac

SEQ ID NO: 176540 - DNA, 15 bp, Homo sapiens
ccacaattagatacc

SEQ ID NO: 176541 - DNA, 15 bp, Homo sapiens
cacaattagatacca

SEQ ID NO: 176542 - DNA, 15 bp, Homo sapiens
acaattagataccat

SEQ ID NO: 176543 - DNA, 15 bp, Homo sapiens
caattagataccatc

SEQ ID NO: 176544 - DNA, 15 bp, Homo sapiens
aattagataccatct

SEQ ID NO: 176545 - DNA, 15 bp, Homo sapiens
attagataccatctc

SEQ ID NO: 176546 - DNA, 15 bp, Homo sapiens
ttagataccatctca

SEQ ID NO: 176547 - DNA, 15 bp, Homo sapiens
tagataccatctcac

SEQ ID NO: 176548 - DNA, 15 bp, Homo sapiens
agataccatctcaca

SEQ ID NO: 176549 - DNA, 15 bp, Homo sapiens
gataccatctcacac

SEQ ID NO: 176550 - DNA, 15 bp, Homo sapiens
ataccatctcacacc

SEQ ID NO: 176551 - DNA, 15 bp, Homo sapiens
taccatctcacacca

SEQ ID NO: 176552 - DNA, 15 bp, Homo sapiens
accatctcacaccag

SEQ ID NO: 176553 - DNA, 15 bp, Homo sapiens
ccatctcacaccagt

SEQ ID NO: 176554 - DNA, 15 bp, Homo sapiens
catctcacaccagtc

SEQ ID NO: 176555 - DNA, 15 bp, Homo sapiens
atctcacaccagtca

SEQ ID NO: 176556 - DNA, 15 bp, Homo sapiens
tctcacaccagtcag

SEQ ID NO: 176557 - DNA, 15 bp, Homo sapiens
ctcacaccagtcaga

SEQ ID NO: 176558 - DNA, 15 bp, Homo sapiens
tcacaccagtcagaa

SEQ ID NO: 176559 - DNA, 15 bp, Homo sapiens
cacaccagtcagaat

SEQ ID NO: 176560 - DNA, 15 bp, Homo sapiens
acaccagtcagaatg

SEQ ID NO: 176561 - DNA, 15 bp, Homo sapiens
caccagtcagaatgc

SEQ ID NO: 176562 - DNA, 15 bp, Homo sapiens
accagtcagaatgcc

SEQ ID NO: 176563 - DNA, 15 bp, Homo sapiens
ccagtcagaatgcct

SEQ ID NO: 176564 - DNA, 15 bp, Homo sapiens
cagtcagaatgcctg

SEQ ID NO: 176565 - DNA, 15 bp, Homo sapiens
agtcagaatgcctgt

SEQ ID NO: 176566 - DNA, 15 bp, Homo sapiens
gtcagaatgcctgtt

SEQ ID NO: 176567 - DNA, 15 bp, Homo sapiens
tcagaatgcctgtta

SEQ ID NO: 176568 - DNA, 15 bp, Homo sapiens
cagaatgcctgttac

SEQ ID NO: 176569 - DNA, 15 bp, Homo sapiens
agaatgcctgttact

SEQ ID NO: 176570 - DNA, 15 bp, Homo sapiens
gaatgcctgttacta

SEQ ID NO: 176571 - DNA, 15 bp, Homo sapiens
aatgcctgttactaa

SEQ ID NO: 176572 - DNA, 15 bp, Homo sapiens
atgcctgttactaaa

SEQ ID NO: 176573 - DNA, 15 bp, Homo sapiens
tgcctgttactaaaa

SEQ ID NO: 176574 - DNA, 15 bp, Homo sapiens
gcctgttactaaaaa

SEQ ID NO: 176575 - DNA, 15 bp, Homo sapiens
cctgttactaaaaag

SEQ ID NO: 176576 - DNA, 15 bp, Homo sapiens
ctgttactaaaaagt

SEQ ID NO: 176577 - DNA, 15 bp, Homo sapiens
tgttactaaaaagtc

SEQ ID NO: 176578 - DNA, 15 bp, Homo sapiens
gttactaaaaagtca

SEQ ID NO: 176579 - DNA, 15 bp, Homo sapiens
ttactaaaaagtcaa

SEQ ID NO: 176580 - DNA, 15 bp, Homo sapiens
tactaaaaagtcaaa

SEQ ID NO: 176581 - DNA, 15 bp, Homo sapiens
actaaaaagtcaaaa

SEQ ID NO: 176582 - DNA, 15 bp, Homo sapiens
ctaaaaagtcaaaaa

SEQ ID NO: 176583 - DNA, 15 bp, Homo sapiens
taaaaagtcaaaaaa

SEQ ID NO: 176584 - DNA, 15 bp, Homo sapiens
aaaaagtcaaaaaat

SEQ ID NO: 176585 - DNA, 15 bp, Homo sapiens
aaaagtcaaaaaata

SEQ ID NO: 176586 - DNA, 15 bp, Homo sapiens
aaagtcaaaaaataa

SEQ ID NO: 176587 - DNA, 15 bp, Homo sapiens
aagtcaaaaaataac

SEQ ID NO: 176588 - DNA, 15 bp, Homo sapiens
agtcaaaaaataaca

SEQ ID NO: 176589 - DNA, 15 bp, Homo sapiens
gtcaaaaaataacag

SEQ ID NO: 176590 - DNA, 15 bp, Homo sapiens
tcaaaaaataacaga

SEQ ID NO: 176591 - DNA, 15 bp, Homo sapiens
caaaaaataacagat

SEQ ID NO: 176592 - DNA, 15 bp, Homo sapiens
aaaaaataacagatg

SEQ ID NO: 176593 - DNA, 15 bp, Homo sapiens
aaaaataacagatgc

SEQ ID NO: 176594 - DNA, 15 bp, Homo sapiens
aaaataacagatgct

SEQ ID NO: 176595 - DNA, 15 bp, Homo sapiens
aaataacagatgctg

SEQ ID NO: 176596 - DNA, 15 bp, Homo sapiens
aataacagatgctgg

SEQ ID NO: 176597 - DNA, 15 bp, Homo sapiens
ataacagatgctggt

SEQ ID NO: 176598 - DNA, 15 bp, Homo sapiens
taacagatgctggtg

SEQ ID NO: 176599 - DNA, 15 bp, Homo sapiens
aacagatgctggtga

SEQ ID NO: 176600 - DNA, 15 bp, Homo sapiens
acagatgctggtgag

SEQ ID NO: 176601 - DNA, 15 bp, Homo sapiens
cagatgctggtgagg

SEQ ID NO: 176602 - DNA, 15 bp, Homo sapiens
agatgctggtgaggt

SEQ ID NO: 176603 - DNA, 15 bp, Homo sapiens
gatgctggtgaggtt

SEQ ID NO: 176604 - DNA, 15 bp, Homo sapiens
atgctggtgaggttg

SEQ ID NO: 176605 - DNA, 15 bp, Homo sapiens
tgctggtgaggttgt

SEQ ID NO: 176606 - DNA, 15 bp, Homo sapiens
gctggtgaggttgtg

SEQ ID NO: 176607 - DNA, 15 bp, Homo sapiens
ctggtgaggttgtga

SEQ ID NO: 176608 - DNA, 15 bp, Homo sapiens
tggtgaggttgtgaa

SEQ ID NO: 176609 - DNA, 15 bp, Homo sapiens
ggtgaggttgtgaaa

SEQ ID NO: 176610 - DNA, 15 bp, Homo sapiens
gtgaggttgtgaaaa

SEQ ID NO: 176611 - DNA, 15 bp, Homo sapiens
tgaggttgtgaaaaa

SEQ ID NO: 176612 - DNA, 15 bp, Homo sapiens
gaggttgtgaaaaaa

SEQ ID NO: 176613 - DNA, 15 bp, Homo sapiens
aggttgtgaaaaaaa

SEQ ID NO: 176614 - DNA, 15 bp, Homo sapiens
ggttgtgaaaaaaag

SEQ ID NO: 176615 - DNA, 15 bp, Homo sapiens
gttgtgaaaaaaagg

SEQ ID NO: 176616 - DNA, 15 bp, Homo sapiens
ttgtgaaaaaaaggg

SEQ ID NO: 176617 - DNA, 15 bp, Homo sapiens
tgtgaaaaaaaggga

SEQ ID NO: 176618 - DNA, 15 bp, Homo sapiens
gtgaaaaaaagggaa

SEQ ID NO: 176619 - DNA, 15 bp, Homo sapiens
tgaaaaaaagggaac

SEQ ID NO: 176620 - DNA, 15 bp, Homo sapiens
gaaaaaaagggaaca

SEQ ID NO: 176621 - DNA, 15 bp, Homo sapiens
aaaaaaagggaacac

SEQ ID NO: 176622 - DNA, 15 bp, Homo sapiens
aaaaaagggaacact

SEQ ID NO: 176623 - DNA, 15 bp, Homo sapiens
aaaaagggaacactt

SEQ ID NO: 176624 - DNA, 15 bp, Homo sapiens
aaaagggaacactta

SEQ ID NO: 176625 - DNA, 15 bp, Homo sapiens
aaagggaacacttac

SEQ ID NO: 176626 - DNA, 15 bp, Homo sapiens
aagggaacacttaca

SEQ ID NO: 176627 - DNA, 15 bp, Homo sapiens
agggaacacttacac

SEQ ID NO: 176628 - DNA, 15 bp, Homo sapiens
gggaacacttacacc

SEQ ID NO: 176629 - DNA, 15 bp, Homo sapiens
ggaacacttacaccc

SEQ ID NO: 176630 - DNA, 15 bp, Homo sapiens
gaacacttacaccct

SEQ ID NO: 176631 - DNA, 15 bp, Homo sapiens
aacacttacaccctg

SEQ ID NO: 176632 - DNA, 15 bp, Homo sapiens
acacttacaccctgt

SEQ ID NO: 176633 - DNA, 15 bp, Homo sapiens
cacttacaccctgtt

SEQ ID NO: 176634 - DNA, 15 bp, Homo sapiens
acttacaccctgttg

SEQ ID NO: 176635 - DNA, 15 bp, Homo sapiens
cttacaccctgttgg

SEQ ID NO: 176636 - DNA, 15 bp, Homo sapiens
ttacaccctgttggt

SEQ ID NO: 176637 - DNA, 15 bp, Homo sapiens
tacaccctgttggtg

SEQ ID NO: 176638 - DNA, 15 bp, Homo sapiens
acaccctgttggtgg

SEQ ID NO: 176639 - DNA, 15 bp, Homo sapiens
caccctgttggtggg

SEQ ID NO: 176640 - DNA, 15 bp, Homo sapiens
accctgttggtggga

SEQ ID NO: 176641 - DNA, 15 bp, Homo sapiens
ccctgttggtgggag

SEQ ID NO: 176642 - DNA, 15 bp, Homo sapiens
cctgttggtgggagt

SEQ ID NO: 176643 - DNA, 15 bp, Homo sapiens
ctgttggtgggagtg

SEQ ID NO: 176644 - DNA, 15 bp, Homo sapiens
tgttggtgggagtgt

SEQ ID NO: 176645 - DNA, 15 bp, Homo sapiens
gttggtgggagtgta

SEQ ID NO: 176646 - DNA, 15 bp, Homo sapiens
ttggtgggagtgtaa

SEQ ID NO: 176647 - DNA, 15 bp, Homo sapiens
tggtgggagtgtaaa

SEQ ID NO: 176648 - DNA, 15 bp, Homo sapiens
ggtgggagtgtaaat

SEQ ID NO: 176649 - DNA, 15 bp, Homo sapiens
gtgggagtgtaaatt

SEQ ID NO: 176650 - DNA, 15 bp, Homo sapiens
tgggagtgtaaatta

SEQ ID NO: 176651 - DNA, 15 bp, Homo sapiens
gggagtgtaaattag

SEQ ID NO: 176652 - DNA, 15 bp, Homo sapiens
ggagtgtaaattagt

SEQ ID NO: 176653 - DNA, 15 bp, Homo sapiens
gagtgtaaattagtt

SEQ ID NO: 176654 - DNA, 15 bp, Homo sapiens
agtgtaaattagttc

SEQ ID NO: 176655 - DNA, 15 bp, Homo sapiens
gtgtaaattagttca

SEQ ID NO: 176656 - DNA, 15 bp, Homo sapiens
tgtaaattagttcaa

SEQ ID NO: 176657 - DNA, 15 bp, Homo sapiens
gtaaattagttcaac

SEQ ID NO: 176658 - DNA, 15 bp, Homo sapiens
taaattagttcaacc

SEQ ID NO: 176659 - DNA, 15 bp, Homo sapiens
aaattagttcaacca

SEQ ID NO: 176660 - DNA, 15 bp, Homo sapiens
aattagttcaaccat

SEQ ID NO: 176661 - DNA, 15 bp, Homo sapiens
attagttcaaccatt

SEQ ID NO: 176662 - DNA, 15 bp, Homo sapiens
ttagttcaaccatta

SEQ ID NO: 176663 - DNA, 15 bp, Homo sapiens
tagttcaaccattat

SEQ ID NO: 176664 - DNA, 15 bp, Homo sapiens
agttcaaccattatg

SEQ ID NO: 176665 - DNA, 15 bp, Homo sapiens
gttcaaccattatgg

SEQ ID NO: 176666 - DNA, 15 bp, Homo sapiens
ttcaaccattatgga

SEQ ID NO: 176667 - DNA, 15 bp, Homo sapiens
tcaaccattatggaa

SEQ ID NO: 176668 - DNA, 15 bp, Homo sapiens
caaccattatggaaa

SEQ ID NO: 176669 - DNA, 15 bp, Homo sapiens
aaccattatggaaag

SEQ ID NO: 176670 - DNA, 15 bp, Homo sapiens
accattatggaaagc

SEQ ID NO: 176671 - DNA, 15 bp, Homo sapiens
ccattatggaaagca

SEQ ID NO: 176672 - DNA, 15 bp, Homo sapiens
cattatggaaagcag

SEQ ID NO: 176673 - DNA, 15 bp, Homo sapiens
attatggaaagcagt

SEQ ID NO: 176674 - DNA, 15 bp, Homo sapiens
ttatggaaagcagta

SEQ ID NO: 176675 - DNA, 15 bp, Homo sapiens
tatggaaagcagtat

SEQ ID NO: 176676 - DNA, 15 bp, Homo sapiens
atggaaagcagtatg

SEQ ID NO: 176677 - DNA, 15 bp, Homo sapiens
tggaaagcagtatgg

SEQ ID NO: 176678 - DNA, 15 bp, Homo sapiens
ggaaagcagtatggt

SEQ ID NO: 176679 - DNA, 15 bp, Homo sapiens
gaaagcagtatggtg

SEQ ID NO: 176680 - DNA, 15 bp, Homo sapiens
aaagcagtatggtga

SEQ ID NO: 176681 - DNA, 15 bp, Homo sapiens
aagcagtatggtgat

SEQ ID NO: 176682 - DNA, 15 bp, Homo sapiens
agcagtatggtgatt

SEQ ID NO: 176683 - DNA, 15 bp, Homo sapiens
gcagtatggtgattc

SEQ ID NO: 176684 - DNA, 15 bp, Homo sapiens
cagtatggtgattcc

SEQ ID NO: 176685 - DNA, 15 bp, Homo sapiens
agtatggtgattcct

SEQ ID NO: 176686 - DNA, 15 bp, Homo sapiens
gtatggtgattcctc

SEQ ID NO: 176687 - DNA, 15 bp, Homo sapiens
tatggtgattcctca

SEQ ID NO: 176688 - DNA, 15 bp, Homo sapiens
atggtgattcctcaa

SEQ ID NO: 176689 - DNA, 15 bp, Homo sapiens
tggtgattcctcaaa

SEQ ID NO: 176690 - DNA, 15 bp, Homo sapiens
ggtgattcctcaaag

SEQ ID NO: 176691 - DNA, 15 bp, Homo sapiens
gtgattcctcaaaga

SEQ ID NO: 176692 - DNA, 15 bp, Homo sapiens
tgattcctcaaagag

SEQ ID NO: 176693 - DNA, 15 bp, Homo sapiens
gattcctcaaagagc

SEQ ID NO: 176694 - DNA, 15 bp, Homo sapiens
attcctcaaagagct

SEQ ID NO: 176695 - DNA, 15 bp, Homo sapiens
ttcctcaaagagcta

SEQ ID NO: 176696 - DNA, 15 bp, Homo sapiens
tcctcaaagagctaa

SEQ ID NO: 176697 - DNA, 15 bp, Homo sapiens
cctcaaagagctaaa

SEQ ID NO: 176698 - DNA, 15 bp, Homo sapiens
ctcaaagagctaaaa

SEQ ID NO: 176699 - DNA, 15 bp, Homo sapiens
tcaaagagctaaaag

SEQ ID NO: 176700 - DNA, 15 bp, Homo sapiens
caaagagctaaaagc

SEQ ID NO: 176701 - DNA, 15 bp, Homo sapiens
aaagagctaaaagca

SEQ ID NO: 176702 - DNA, 15 bp, Homo sapiens
aagagctaaaagcag

SEQ ID NO: 176703 - DNA, 15 bp, Homo sapiens
agagctaaaagcaga

SEQ ID NO: 176704 - DNA, 15 bp, Homo sapiens
gagctaaaagcagaa

SEQ ID NO: 176705 - DNA, 15 bp, Homo sapiens
agctaaaagcagaac

SEQ ID NO: 176706 - DNA, 15 bp, Homo sapiens
gctaaaagcagaact

SEQ ID NO: 176707 - DNA, 15 bp, Homo sapiens
ctaaaagcagaactg

SEQ ID NO: 176708 - DNA, 15 bp, Homo sapiens
taaaagcagaactgc

SEQ ID NO: 176709 - DNA, 15 bp, Homo sapiens
aaaagcagaactgcc

SEQ ID NO: 176710 - DNA, 15 bp, Homo sapiens
aaagcagaactgcca

SEQ ID NO: 176711 - DNA, 15 bp, Homo sapiens
aagcagaactgccat

SEQ ID NO: 176712 - DNA, 15 bp, Homo sapiens
agcagaactgccatt

SEQ ID NO: 176713 - DNA, 15 bp, Homo sapiens
gcagaactgccattc

SEQ ID NO: 176714 - DNA, 15 bp, Homo sapiens
cagaactgccattcg

SEQ ID NO: 176715 - DNA, 15 bp, Homo sapiens
agaactgccattcga

SEQ ID NO: 176716 - DNA, 15 bp, Homo sapiens
gaactgccattcgac

SEQ ID NO: 176717 - DNA, 15 bp, Homo sapiens
aactgccattcgacc

SEQ ID NO: 176718 - DNA, 15 bp, Homo sapiens
actgccattcgaccc

SEQ ID NO: 176719 - DNA, 15 bp, Homo sapiens
ctgccattcgaccca

SEQ ID NO: 176720 - DNA, 15 bp, Homo sapiens
tgccattcgacccaa

SEQ ID NO: 176721 - DNA, 15 bp, Homo sapiens
gccattcgacccaac

SEQ ID NO: 176722 - DNA, 15 bp, Homo sapiens
ccattcgacccaaca

SEQ ID NO: 176723 - DNA, 15 bp, Homo sapiens
cattcgacccaacaa

SEQ ID NO: 176724 - DNA, 15 bp, Homo sapiens
attcgacccaacaat

SEQ ID NO: 176725 - DNA, 15 bp, Homo sapiens
ttcgacccaacaatc

SEQ ID NO: 176726 - DNA, 15 bp, Homo sapiens
tcgacccaacaatcc

SEQ ID NO: 176727 - DNA, 15 bp, Homo sapiens
cgacccaacaatccc

SEQ ID NO: 176728 - DNA, 15 bp, Homo sapiens
gacccaacaatccca

SEQ ID NO: 176729 - DNA, 15 bp, Homo sapiens
acccaacaatcccat

SEQ ID NO: 176730 - DNA, 15 bp, Homo sapiens
cccaacaatcccatt

SEQ ID NO: 176731 - DNA, 15 bp, Homo sapiens
ccaacaatcccatta

SEQ ID NO: 176732 - DNA, 15 bp, Homo sapiens
caacaatcccattac

SEQ ID NO: 176733 - DNA, 15 bp, Homo sapiens
aacaatcccattact

SEQ ID NO: 176734 - DNA, 15 bp, Homo sapiens
acaatcccattactg

SEQ ID NO: 176735 - DNA, 15 bp, Homo sapiens
caatcccattactgg

SEQ ID NO: 176736 - DNA, 15 bp, Homo sapiens
aatcccattactgga

SEQ ID NO: 176737 - DNA, 15 bp, Homo sapiens
atcccattactggat

SEQ ID NO: 176738 - DNA, 15 bp, Homo sapiens
tcccattactggata

SEQ ID NO: 176739 - DNA, 15 bp, Homo sapiens
cccattactggatat

SEQ ID NO: 176740 - DNA, 15 bp, Homo sapiens
ccattactggatata

SEQ ID NO: 176741 - DNA, 15 bp, Homo sapiens
cattactggatatat

SEQ ID NO: 176742 - DNA, 15 bp, Homo sapiens
attactggatatata

SEQ ID NO: 176743 - DNA, 15 bp, Homo sapiens
ttactggatatatac

SEQ ID NO: 176744 - DNA, 15 bp, Homo sapiens
tactggatatatacc

SEQ ID NO: 176745 - DNA, 15 bp, Homo sapiens
actggatatataccc

SEQ ID NO: 176746 - DNA, 15 bp, Homo sapiens
ctggatatataccca

SEQ ID NO: 176747 - DNA, 15 bp, Homo sapiens
tggatatatacccag

SEQ ID NO: 176748 - DNA, 15 bp, Homo sapiens
ggatatatacccaga

SEQ ID NO: 176749 - DNA, 15 bp, Homo sapiens
gatatatacccagag

SEQ ID NO: 176750 - DNA, 15 bp, Homo sapiens
atatatacccagaga

SEQ ID NO: 176751 - DNA, 15 bp, Homo sapiens
tatatacccagagaa

SEQ ID NO: 176752 - DNA, 15 bp, Homo sapiens
atatacccagagaaa

SEQ ID NO: 176753 - DNA, 15 bp, Homo sapiens
tatacccagagaaat

SEQ ID NO: 176754 - DNA, 15 bp, Homo sapiens
atacccagagaaata

SEQ ID NO: 176755 - DNA, 15 bp, Homo sapiens
tacccagagaaatat

SEQ ID NO: 176756 - DNA, 15 bp, Homo sapiens
acccagagaaatata

SEQ ID NO: 176757 - DNA, 15 bp, Homo sapiens
cccagagaaatataa

SEQ ID NO: 176758 - DNA, 15 bp, Homo sapiens
ccagagaaatataaa

SEQ ID NO: 176759 - DNA, 15 bp, Homo sapiens
cagagaaatataaat

SEQ ID NO: 176760 - DNA, 15 bp, Homo sapiens
agagaaatataaatc

SEQ ID NO: 176761 - DNA, 15 bp, Homo sapiens
gagaaatataaatca

SEQ ID NO: 176762 - DNA, 15 bp, Homo sapiens
agaaatataaatcat

SEQ ID NO: 176763 - DNA, 15 bp, Homo sapiens
gaaatataaatcatt

SEQ ID NO: 176764 - DNA, 15 bp, Homo sapiens
aaatataaatcattt

SEQ ID NO: 176765 - DNA, 15 bp, Homo sapiens
aatataaatcatttt

SEQ ID NO: 176766 - DNA, 15 bp, Homo sapiens
atataaatcatttta

SEQ ID NO: 176767 - DNA, 15 bp, Homo sapiens
tataaatcattttac

SEQ ID NO: 176768 - DNA, 15 bp, Homo sapiens
ataaatcattttacc

SEQ ID NO: 176769 - DNA, 15 bp, Homo sapiens
taaatcattttacca

SEQ ID NO: 176770 - DNA, 15 bp, Homo sapiens
aaatcattttaccat

SEQ ID NO: 176771 - DNA, 15 bp, Homo sapiens
aatcattttaccata

SEQ ID NO: 176772 - DNA, 15 bp, Homo sapiens
atcattttaccataa

SEQ ID NO: 176773 - DNA, 15 bp, Homo sapiens
tcattttaccataaa

SEQ ID NO: 176774 - DNA, 15 bp, Homo sapiens
cattttaccataaag

SEQ ID NO: 176775 - DNA, 15 bp, Homo sapiens
attttaccataaaga

SEQ ID NO: 176776 - DNA, 15 bp, Homo sapiens
ttttaccataaagac

SEQ ID NO: 176777 - DNA, 15 bp, Homo sapiens
tttaccataaagaca

SEQ ID NO: 176778 - DNA, 15 bp, Homo sapiens
ttaccataaagacat

SEQ ID NO: 176779 - DNA, 15 bp, Homo sapiens
taccataaagacatg

SEQ ID NO: 176780 - DNA, 15 bp, Homo sapiens
accataaagacatgt

SEQ ID NO: 176781 - DNA, 15 bp, Homo sapiens
ccataaagacatgtg

SEQ ID NO: 176782 - DNA, 15 bp, Homo sapiens
cataaagacatgtgc

SEQ ID NO: 176783 - DNA, 15 bp, Homo sapiens
ataaagacatgtgca

SEQ ID NO: 176784 - DNA, 15 bp, Homo sapiens
taaagacatgtgcac

SEQ ID NO: 176785 - DNA, 15 bp, Homo sapiens
aaagacatgtgcacg

SEQ ID NO: 176786 - DNA, 15 bp, Homo sapiens
aagacatgtgcacgt

SEQ ID NO: 176787 - DNA, 15 bp, Homo sapiens
agacatgtgcacgtg

SEQ ID NO: 176788 - DNA, 15 bp, Homo sapiens
gacatgtgcacgtga

SEQ ID NO: 176789 - DNA, 15 bp, Homo sapiens
acatgtgcacgtgaa

SEQ ID NO: 176790 - DNA, 15 bp, Homo sapiens
catgtgcacgtgaat

SEQ ID NO: 176791 - DNA, 15 bp, Homo sapiens
atgtgcacgtgaatg

SEQ ID NO: 176792 - DNA, 15 bp, Homo sapiens
tgtgcacgtgaatgt

SEQ ID NO: 176793 - DNA, 15 bp, Homo sapiens
gtgcacgtgaatgtt

SEQ ID NO: 176794 - DNA, 15 bp, Homo sapiens
tgcacgtgaatgttc

SEQ ID NO: 176795 - DNA, 15 bp, Homo sapiens
gcacgtgaatgttca

SEQ ID NO: 176796 - DNA, 15 bp, Homo sapiens
cacgtgaatgttcac

SEQ ID NO: 176797 - DNA, 15 bp, Homo sapiens
acgtgaatgttcact

SEQ ID NO: 176798 - DNA, 15 bp, Homo sapiens
cgtgaatgttcactg

SEQ ID NO: 176799 - DNA, 15 bp, Homo sapiens
gtgaatgttcactgc

SEQ ID NO: 176800 - DNA, 15 bp, Homo sapiens
tgaatgttcactgca

SEQ ID NO: 176801 - DNA, 15 bp, Homo sapiens
gaatgttcactgcag

SEQ ID NO: 176802 - DNA, 15 bp, Homo sapiens
aatgttcactgcagc

SEQ ID NO: 176803 - DNA, 15 bp, Homo sapiens
atgttcactgcagca

SEQ ID NO: 176804 - DNA, 15 bp, Homo sapiens
tgttcactgcagcac

SEQ ID NO: 176805 - DNA, 15 bp, Homo sapiens
gttcactgcagcact

SEQ ID NO: 176806 - DNA, 15 bp, Homo sapiens
ttcactgcagcacta

SEQ ID NO: 176807 - DNA, 15 bp, Homo sapiens
tcactgcagcactat

SEQ ID NO: 176808 - DNA, 15 bp, Homo sapiens
cactgcagcactatt

SEQ ID NO: 176809 - DNA, 15 bp, Homo sapiens
actgcagcactattc

SEQ ID NO: 176810 - DNA, 15 bp, Homo sapiens
ctgcagcactattca

SEQ ID NO: 176811 - DNA, 15 bp, Homo sapiens
tgcagcactattcac

SEQ ID NO: 176812 - DNA, 15 bp, Homo sapiens
gcagcactattcaca

SEQ ID NO: 176813 - DNA, 15 bp, Homo sapiens
cagcactattcacaa

SEQ ID NO: 176814 - DNA, 15 bp, Homo sapiens
agcactattcacaat

SEQ ID NO: 176815 - DNA, 15 bp, Homo sapiens
gcactattcacaata

SEQ ID NO: 176816 - DNA, 15 bp, Homo sapiens
cactattcacaatag

SEQ ID NO: 176817 - DNA, 15 bp, Homo sapiens
actattcacaatagc

SEQ ID NO: 176818 - DNA, 15 bp, Homo sapiens
ctattcacaatagca

SEQ ID NO: 176819 - DNA, 15 bp, Homo sapiens
tattcacaatagcaa

SEQ ID NO: 176820 - DNA, 15 bp, Homo sapiens
attcacaatagcaaa

SEQ ID NO: 176821 - DNA, 15 bp, Homo sapiens
ttcacaatagcaaaa

SEQ ID NO: 176822 - DNA, 15 bp, Homo sapiens
tcacaatagcaaaaa

SEQ ID NO: 176823 - DNA, 15 bp, Homo sapiens
cacaatagcaaaaac

SEQ ID NO: 176824 - DNA, 15 bp, Homo sapiens
acaatagcaaaaact

SEQ ID NO: 176825 - DNA, 15 bp, Homo sapiens
caatagcaaaaactt

SEQ ID NO: 176826 - DNA, 15 bp, Homo sapiens
aatagcaaaaacttg

SEQ ID NO: 176827 - DNA, 15 bp, Homo sapiens
atagcaaaaacttgg

SEQ ID NO: 176828 - DNA, 15 bp, Homo sapiens
tagcaaaaacttgga

SEQ ID NO: 176829 - DNA, 15 bp, Homo sapiens
agcaaaaacttggaa

SEQ ID NO: 176830 - DNA, 15 bp, Homo sapiens
gcaaaaacttggaat

SEQ ID NO: 176831 - DNA, 15 bp, Homo sapiens
caaaaacttggaatc

SEQ ID NO: 176832 - DNA, 15 bp, Homo sapiens
aaaaacttggaatct

SEQ ID NO: 176833 - DNA, 15 bp, Homo sapiens
aaaacttggaatctt

SEQ ID NO: 176834 - DNA, 15 bp, Homo sapiens
aaacttggaatcttt

SEQ ID NO: 176835 - DNA, 15 bp, Homo sapiens
aacttggaatctttt

SEQ ID NO: 176836 - DNA, 15 bp, Homo sapiens
acttggaatcttttc

SEQ ID NO: 176837 - DNA, 15 bp, Homo sapiens
cttggaatcttttca

SEQ ID NO: 176838 - DNA, 15 bp, Homo sapiens
ttggaatcttttcat

SEQ ID NO: 176839 - DNA, 15 bp, Homo sapiens
tggaatcttttcatg

SEQ ID NO: 176840 - DNA, 15 bp, Homo sapiens
ggaatcttttcatga

SEQ ID NO: 176841 - DNA, 15 bp, Homo sapiens
gaatcttttcatgaa

SEQ ID NO: 176842 - DNA, 15 bp, Homo sapiens
aatcttttcatgaaa

SEQ ID NO: 176843 - DNA, 15 bp, Homo sapiens
atcttttcatgaaaa

SEQ ID NO: 176844 - DNA, 15 bp, Homo sapiens
tcttttcatgaaaac

SEQ ID NO: 176845 - DNA, 15 bp, Homo sapiens
cttttcatgaaaacc

SEQ ID NO: 176846 - DNA, 15 bp, Homo sapiens
ttttcatgaaaacct

SEQ ID NO: 176847 - DNA, 15 bp, Homo sapiens
tttcatgaaaaccta

SEQ ID NO: 176848 - DNA, 15 bp, Homo sapiens
ttcatgaaaacctat

SEQ ID NO: 176849 - DNA, 15 bp, Homo sapiens
tcatgaaaacctata

SEQ ID NO: 176850 - DNA, 15 bp, Homo sapiens
catgaaaacctatat

SEQ ID NO: 176851 - DNA, 15 bp, Homo sapiens
atgaaaacctatatg

SEQ ID NO: 176852 - DNA, 15 bp, Homo sapiens
tgaaaacctatatgc

SEQ ID NO: 176853 - DNA, 15 bp, Homo sapiens
gaaaacctatatgcc

SEQ ID NO: 176854 - DNA, 15 bp, Homo sapiens
aaaacctatatgccc

SEQ ID NO: 176855 - DNA, 15 bp, Homo sapiens
aaacctatatgccca

SEQ ID NO: 176856 - DNA, 15 bp, Homo sapiens
aacctatatgcccac

SEQ ID NO: 176857 - DNA, 15 bp, Homo sapiens
acctatatgcccacc

SEQ ID NO: 176858 - DNA, 15 bp, Homo sapiens
cctatatgcccacca

SEQ ID NO: 176859 - DNA, 15 bp, Homo sapiens
ctatatgcccaccaa

SEQ ID NO: 176860 - DNA, 15 bp, Homo sapiens
tatatgcccaccaac

SEQ ID NO: 176861 - DNA, 15 bp, Homo sapiens
atatgcccaccaaca

SEQ ID NO: 176862 - DNA, 15 bp, Homo sapiens
tatgcccaccaacaa

SEQ ID NO: 176863 - DNA, 15 bp, Homo sapiens
atgcccaccaacaac

SEQ ID NO: 176864 - DNA, 15 bp, Homo sapiens
tgcccaccaacaaca

SEQ ID NO: 176865 - DNA, 15 bp, Homo sapiens
gcccaccaacaacag

SEQ ID NO: 176866 - DNA, 15 bp, Homo sapiens
cccaccaacaacaga

SEQ ID NO: 176867 - DNA, 15 bp, Homo sapiens
ccaccaacaacagat

SEQ ID NO: 176868 - DNA, 15 bp, Homo sapiens
caccaacaacagatt

SEQ ID NO: 176869 - DNA, 15 bp, Homo sapiens
accaacaacagattg

SEQ ID NO: 176870 - DNA, 15 bp, Homo sapiens
ccaacaacagattgg

SEQ ID NO: 176871 - DNA, 15 bp, Homo sapiens
caacaacagattgga

SEQ ID NO: 176872 - DNA, 15 bp, Homo sapiens
aacaacagattggat

SEQ ID NO: 176873 - DNA, 15 bp, Homo sapiens
acaacagattggata

SEQ ID NO: 176874 - DNA, 15 bp, Homo sapiens
caacagattggataa

SEQ ID NO: 176875 - DNA, 15 bp, Homo sapiens
aacagattggataaa

SEQ ID NO: 176876 - DNA, 15 bp, Homo sapiens
acagattggataaag

SEQ ID NO: 176877 - DNA, 15 bp, Homo sapiens
cagattggataaaga

SEQ ID NO: 176878 - DNA, 15 bp, Homo sapiens
agattggataaagaa

SEQ ID NO: 176879 - DNA, 15 bp, Homo sapiens
gattggataaagaaa

SEQ ID NO: 176880 - DNA, 15 bp, Homo sapiens
attggataaagaaaa

SEQ ID NO: 176881 - DNA, 15 bp, Homo sapiens
ttggataaagaaaat

SEQ ID NO: 176882 - DNA, 15 bp, Homo sapiens
tggataaagaaaatg

SEQ ID NO: 176883 - DNA, 15 bp, Homo sapiens
ggataaagaaaatgt

SEQ ID NO: 176884 - DNA, 15 bp, Homo sapiens
gataaagaaaatgtg

SEQ ID NO: 176885 - DNA, 15 bp, Homo sapiens
ataaagaaaatgtgg

SEQ ID NO: 176886 - DNA, 15 bp, Homo sapiens
taaagaaaatgtggt

SEQ ID NO: 176887 - DNA, 15 bp, Homo sapiens
aaagaaaatgtggta

SEQ ID NO: 176888 - DNA, 15 bp, Homo sapiens
aagaaaatgtggtac

SEQ ID NO: 176889 - DNA, 15 bp, Homo sapiens
agaaaatgtggtaca

SEQ ID NO: 176890 - DNA, 15 bp, Homo sapiens
gaaaatgtggtacat

SEQ ID NO: 176891 - DNA, 15 bp, Homo sapiens
aaaatgtggtacata

SEQ ID NO: 176892 - DNA, 15 bp, Homo sapiens
aaatgtggtacatac

SEQ ID NO: 176893 - DNA, 15 bp, Homo sapiens
aatgtggtacataca

SEQ ID NO: 176894 - DNA, 15 bp, Homo sapiens
atgtggtacatacac

SEQ ID NO: 176895 - DNA, 15 bp, Homo sapiens
tgtggtacatacaca

SEQ ID NO: 176896 - DNA, 15 bp, Homo sapiens
gtggtacatacacac

SEQ ID NO: 176897 - DNA, 15 bp, Homo sapiens
tggtacatacacacc

SEQ ID NO: 176898 - DNA, 15 bp, Homo sapiens
ggtacatacacacca

SEQ ID NO: 176899 - DNA, 15 bp, Homo sapiens
gtacatacacaccat

SEQ ID NO: 176900 - DNA, 15 bp, Homo sapiens
tacatacacaccatg

SEQ ID NO: 176901 - DNA, 15 bp, Homo sapiens
acatacacaccatgg

SEQ ID NO: 176902 - DNA, 15 bp, Homo sapiens
catacacaccatgga

SEQ ID NO: 176903 - DNA, 15 bp, Homo sapiens
atacacaccatggaa

SEQ ID NO: 176904 - DNA, 15 bp, Homo sapiens
tacacaccatggaat

SEQ ID NO: 176905 - DNA, 15 bp, Homo sapiens
acacaccatggaata

SEQ ID NO: 176906 - DNA, 15 bp, Homo sapiens
cacaccatggaatac

SEQ ID NO: 176907 - DNA, 15 bp, Homo sapiens
acaccatggaatacc

SEQ ID NO: 176908 - DNA, 15 bp, Homo sapiens
caccatggaatacca

SEQ ID NO: 176909 - DNA, 15 bp, Homo sapiens
accatggaataccat

SEQ ID NO: 176910 - DNA, 15 bp, Homo sapiens
ccatggaataccatg

SEQ ID NO: 176911 - DNA, 15 bp, Homo sapiens
catggaataccatgc

SEQ ID NO: 176912 - DNA, 15 bp, Homo sapiens
atggaataccatgca

SEQ ID NO: 176913 - DNA, 15 bp, Homo sapiens
tggaataccatgcag

SEQ ID NO: 176914 - DNA, 15 bp, Homo sapiens
ggaataccatgcagc

SEQ ID NO: 176915 - DNA, 15 bp, Homo sapiens
gaataccatgcagcc

SEQ ID NO: 176916 - DNA, 15 bp, Homo sapiens
aataccatgcagcca

SEQ ID NO: 176917 - DNA, 15 bp, Homo sapiens
ataccatgcagccat

SEQ ID NO: 176918 - DNA, 15 bp, Homo sapiens
taccatgcagccata

SEQ ID NO: 176919 - DNA, 15 bp, Homo sapiens
accatgcagccataa

SEQ ID NO: 176920 - DNA, 15 bp, Homo sapiens
ccatgcagccataaa

SEQ ID NO: 176921 - DNA, 15 bp, Homo sapiens
catgcagccataaaa

SEQ ID NO: 176922 - DNA, 15 bp, Homo sapiens
atgcagccataaaaa

SEQ ID NO: 176923 - DNA, 15 bp, Homo sapiens
tgcagccataaaaaa

SEQ ID NO: 176924 - DNA, 15 bp, Homo sapiens
gcagccataaaaaag

SEQ ID NO: 176925 - DNA, 15 bp, Homo sapiens
cagccataaaaaaga

SEQ ID NO: 176926 - DNA, 15 bp, Homo sapiens
agccataaaaaagaa

SEQ ID NO: 176927 - DNA, 15 bp, Homo sapiens
gccataaaaaagaac

SEQ ID NO: 176928 - DNA, 15 bp, Homo sapiens
ccataaaaaagaacc

SEQ ID NO: 176929 - DNA, 15 bp, Homo sapiens
cataaaaaagaacca

SEQ ID NO: 176930 - DNA, 15 bp, Homo sapiens
ataaaaaagaaccag

SEQ ID NO: 176931 - DNA, 15 bp, Homo sapiens
taaaaaagaaccaga

SEQ ID NO: 176932 - DNA, 15 bp, Homo sapiens
aaaaaagaaccagat

SEQ ID NO: 176933 - DNA, 15 bp, Homo sapiens
aaaaagaaccagatt

SEQ ID NO: 176934 - DNA, 15 bp, Homo sapiens
aaaagaaccagatta

SEQ ID NO: 176935 - DNA, 15 bp, Homo sapiens
aaagaaccagattat

SEQ ID NO: 176936 - DNA, 15 bp, Homo sapiens
aagaaccagattata

SEQ ID NO: 176937 - DNA, 15 bp, Homo sapiens
agaaccagattataa

SEQ ID NO: 176938 - DNA, 15 bp, Homo sapiens
gaaccagattataac

SEQ ID NO: 176939 - DNA, 15 bp, Homo sapiens
aaccagattataact

SEQ ID NO: 176940 - DNA, 15 bp, Homo sapiens
accagattataactt

SEQ ID NO: 176941 - DNA, 15 bp, Homo sapiens
ccagattataacttt

SEQ ID NO: 176942 - DNA, 15 bp, Homo sapiens
cagattataactttt

SEQ ID NO: 176943 - DNA, 15 bp, Homo sapiens
agattataacttttg

SEQ ID NO: 176944 - DNA, 15 bp, Homo sapiens
gattataacttttgt

SEQ ID NO: 176945 - DNA, 15 bp, Homo sapiens
attataacttttgtg

SEQ ID NO: 176946 - DNA, 15 bp, Homo sapiens
ttataacttttgtgg

SEQ ID NO: 176947 - DNA, 15 bp, Homo sapiens
tataacttttgtggg

SEQ ID NO: 176948 - DNA, 15 bp, Homo sapiens
ataacttttgtggga

SEQ ID NO: 176949 - DNA, 15 bp, Homo sapiens
taacttttgtgggaa

SEQ ID NO: 176950 - DNA, 15 bp, Homo sapiens
aacttttgtgggaac

SEQ ID NO: 176951 - DNA, 15 bp, Homo sapiens
acttttgtgggaaca

SEQ ID NO: 176952 - DNA, 15 bp, Homo sapiens
cttttgtgggaacat

SEQ ID NO: 176953 - DNA, 15 bp, Homo sapiens
ttttgtgggaacatg

SEQ ID NO: 176954 - DNA, 15 bp, Homo sapiens
tttgtgggaacatgg

SEQ ID NO: 176955 - DNA, 15 bp, Homo sapiens
ttgtgggaacatgga

SEQ ID NO: 176956 - DNA, 15 bp, Homo sapiens
tgtgggaacatggat

SEQ ID NO: 176957 - DNA, 15 bp, Homo sapiens
gtgggaacatggatg

SEQ ID NO: 176958 - DNA, 15 bp, Homo sapiens
tgggaacatggatgt

SEQ ID NO: 176959 - DNA, 15 bp, Homo sapiens
gggaacatggatgta

SEQ ID NO: 176960 - DNA, 15 bp, Homo sapiens
ggaacatggatgtag

SEQ ID NO: 176961 - DNA, 15 bp, Homo sapiens
gaacatggatgtagc

SEQ ID NO: 176962 - DNA, 15 bp, Homo sapiens
aacatggatgtagct

SEQ ID NO: 176963 - DNA, 15 bp, Homo sapiens
acatggatgtagcta

SEQ ID NO: 176964 - DNA, 15 bp, Homo sapiens
catggatgtagctag

SEQ ID NO: 176965 - DNA, 15 bp, Homo sapiens
atggatgtagctaga

SEQ ID NO: 176966 - DNA, 15 bp, Homo sapiens
tggatgtagctagag

SEQ ID NO: 176967 - DNA, 15 bp, Homo sapiens
ggatgtagctagagg

SEQ ID NO: 176968 - DNA, 15 bp, Homo sapiens
gatgtagctagaggc

SEQ ID NO: 176969 - DNA, 15 bp, Homo sapiens
atgtagctagaggct

SEQ ID NO: 176970 - DNA, 15 bp, Homo sapiens
tgtagctagaggcta

SEQ ID NO: 176971 - DNA, 15 bp, Homo sapiens
gtagctagaggctat

SEQ ID NO: 176972 - DNA, 15 bp, Homo sapiens
tagctagaggctatt

SEQ ID NO: 176973 - DNA, 15 bp, Homo sapiens
agctagaggctatta

SEQ ID NO: 176974 - DNA, 15 bp, Homo sapiens
gctagaggctattat

SEQ ID NO: 176975 - DNA, 15 bp, Homo sapiens
ctagaggctattatc

SEQ ID NO: 176976 - DNA, 15 bp, Homo sapiens
tagaggctattatcc

SEQ ID NO: 176977 - DNA, 15 bp, Homo sapiens
agaggctattatcct

SEQ ID NO: 176978 - DNA, 15 bp, Homo sapiens
gaggctattatcctc

SEQ ID NO: 176979 - DNA, 15 bp, Homo sapiens
aggctattatcctca

SEQ ID NO: 176980 - DNA, 15 bp, Homo sapiens
ggctattatcctcag

SEQ ID NO: 176981 - DNA, 15 bp, Homo sapiens
gctattatcctcagc

SEQ ID NO: 176982 - DNA, 15 bp, Homo sapiens
ctattatcctcagca

SEQ ID NO: 176983 - DNA, 15 bp, Homo sapiens
tattatcctcagcaa

SEQ ID NO: 176984 - DNA, 15 bp, Homo sapiens
attatcctcagcaaa

SEQ ID NO: 176985 - DNA, 15 bp, Homo sapiens
ttatcctcagcaaac

SEQ ID NO: 176986 - DNA, 15 bp, Homo sapiens
tatcctcagcaaacc

SEQ ID NO: 176987 - DNA, 15 bp, Homo sapiens
atcctcagcaaacca

SEQ ID NO: 176988 - DNA, 15 bp, Homo sapiens
tcctcagcaaaccaa

SEQ ID NO: 176989 - DNA, 15 bp, Homo sapiens
cctcagcaaaccaac

SEQ ID NO: 176990 - DNA, 15 bp, Homo sapiens
ctcagcaaaccaaca

SEQ ID NO: 176991 - DNA, 15 bp, Homo sapiens
tcagcaaaccaacag

SEQ ID NO: 176992 - DNA, 15 bp, Homo sapiens
cagcaaaccaacaga

SEQ ID NO: 176993 - DNA, 15 bp, Homo sapiens
agcaaaccaacagag

SEQ ID NO: 176994 - DNA, 15 bp, Homo sapiens
gcaaaccaacagagg

SEQ ID NO: 176995 - DNA, 15 bp, Homo sapiens
caaaccaacagagga

SEQ ID NO: 176996 - DNA, 15 bp, Homo sapiens
aaaccaacagaggaa

SEQ ID NO: 176997 - DNA, 15 bp, Homo sapiens
aaccaacagaggaaa

SEQ ID NO: 176998 - DNA, 15 bp, Homo sapiens
accaacagaggaaaa

SEQ ID NO: 176999 - DNA, 15 bp, Homo sapiens
ccaacagaggaaaag

SEQ ID NO: 177000 - DNA, 15 bp, Homo sapiens
caacagaggaaaaga

SEQ ID NO: 177001 - DNA, 15 bp, Homo sapiens
aacagaggaaaagaa

SEQ ID NO: 177002 - DNA, 15 bp, Homo sapiens
acagaggaaaagaaa

SEQ ID NO: 177003 - DNA, 15 bp, Homo sapiens
cagaggaaaagaaaa

SEQ ID NO: 177004 - DNA, 15 bp, Homo sapiens
agaggaaaagaaaac

SEQ ID NO: 177005 - DNA, 15 bp, Homo sapiens
gaggaaaagaaaacc

SEQ ID NO: 177006 - DNA, 15 bp, Homo sapiens
aggaaaagaaaacca

SEQ ID NO: 177007 - DNA, 15 bp, Homo sapiens
ggaaaagaaaaccag

SEQ ID NO: 177008 - DNA, 15 bp, Homo sapiens
gaaaagaaaaccaga

SEQ ID NO: 177009 - DNA, 15 bp, Homo sapiens
aaaagaaaaccagat

SEQ ID NO: 177010 - DNA, 15 bp, Homo sapiens
aaagaaaaccagata

SEQ ID NO: 177011 - DNA, 15 bp, Homo sapiens
aagaaaaccagatac

SEQ ID NO: 177012 - DNA, 15 bp, Homo sapiens
agaaaaccagatacc

SEQ ID NO: 177013 - DNA, 15 bp, Homo sapiens
gaaaaccagatacca

SEQ ID NO: 177014 - DNA, 15 bp, Homo sapiens
aaaaccagataccac

SEQ ID NO: 177015 - DNA, 15 bp, Homo sapiens
aaaccagataccaca

SEQ ID NO: 177016 - DNA, 15 bp, Homo sapiens
aaccagataccacat

SEQ ID NO: 177017 - DNA, 15 bp, Homo sapiens
accagataccacatg

SEQ ID NO: 177018 - DNA, 15 bp, Homo sapiens
ccagataccacatgt

SEQ ID NO: 177019 - DNA, 15 bp, Homo sapiens
cagataccacatgtt

SEQ ID NO: 177020 - DNA, 15 bp, Homo sapiens
agataccacatgttc

SEQ ID NO: 177021 - DNA, 15 bp, Homo sapiens
gataccacatgttct

SEQ ID NO: 177022 - DNA, 15 bp, Homo sapiens
ataccacatgttctc

SEQ ID NO: 177023 - DNA, 15 bp, Homo sapiens
taccacatgttctca

SEQ ID NO: 177024 - DNA, 15 bp, Homo sapiens
accacatgttctcac

SEQ ID NO: 177025 - DNA, 15 bp, Homo sapiens
ccacatgttctcact

SEQ ID NO: 177026 - DNA, 15 bp, Homo sapiens
cacatgttctcactt

SEQ ID NO: 177027 - DNA, 15 bp, Homo sapiens
acatgttctcactta

SEQ ID NO: 177028 - DNA, 15 bp, Homo sapiens
catgttctcacttat

SEQ ID NO: 177029 - DNA, 15 bp, Homo sapiens
atgttctcacttata

SEQ ID NO: 177030 - DNA, 15 bp, Homo sapiens
tgttctcacttataa

SEQ ID NO: 177031 - DNA, 15 bp, Homo sapiens
gttctcacttataaa

SEQ ID NO: 177032 - DNA, 15 bp, Homo sapiens
ttctcacttataaac

SEQ ID NO: 177033 - DNA, 15 bp, Homo sapiens
tctcacttataaacg

SEQ ID NO: 177034 - DNA, 15 bp, Homo sapiens
ctcacttataaacgg

SEQ ID NO: 177035 - DNA, 15 bp, Homo sapiens
tcacttataaacggg

SEQ ID NO: 177036 - DNA, 15 bp, Homo sapiens
cacttataaacggga

SEQ ID NO: 177037 - DNA, 15 bp, Homo sapiens
acttataaacgggag

SEQ ID NO: 177038 - DNA, 15 bp, Homo sapiens
cttataaacgggagc

SEQ ID NO: 177039 - DNA, 15 bp, Homo sapiens
ttataaacgggagct

SEQ ID NO: 177040 - DNA, 15 bp, Homo sapiens
tataaacgggagcta

SEQ ID NO: 177041 - DNA, 15 bp, Homo sapiens
ataaacgggagctaa

SEQ ID NO: 177042 - DNA, 15 bp, Homo sapiens
taaacgggagctaaa

SEQ ID NO: 177043 - DNA, 15 bp, Homo sapiens
aaacgggagctaaat

SEQ ID NO: 177044 - DNA, 15 bp, Homo sapiens
aacgggagctaaatg

SEQ ID NO: 177045 - DNA, 15 bp, Homo sapiens
acgggagctaaatga

SEQ ID NO: 177046 - DNA, 15 bp, Homo sapiens
cgggagctaaatgat

SEQ ID NO: 177047 - DNA, 15 bp, Homo sapiens
gggagctaaatgatg

SEQ ID NO: 177048 - DNA, 15 bp, Homo sapiens
ggagctaaatgatga

SEQ ID NO: 177049 - DNA, 15 bp, Homo sapiens
gagctaaatgatgag

SEQ ID NO: 177050 - DNA, 15 bp, Homo sapiens
agctaaatgatgaga

SEQ ID NO: 177051 - DNA, 15 bp, Homo sapiens
gctaaatgatgagaa

SEQ ID NO: 177052 - DNA, 15 bp, Homo sapiens
ctaaatgatgagaat

SEQ ID NO: 177053 - DNA, 15 bp, Homo sapiens
taaatgatgagaatt

SEQ ID NO: 177054 - DNA, 15 bp, Homo sapiens
aaatgatgagaattt

SEQ ID NO: 177055 - DNA, 15 bp, Homo sapiens
aatgatgagaattta

SEQ ID NO: 177056 - DNA, 15 bp, Homo sapiens
atgatgagaatttat

SEQ ID NO: 177057 - DNA, 15 bp, Homo sapiens
tgatgagaatttatg

SEQ ID NO: 177058 - DNA, 15 bp, Homo sapiens
gatgagaatttatga

SEQ ID NO: 177059 - DNA, 15 bp, Homo sapiens
atgagaatttatgaa

SEQ ID NO: 177060 - DNA, 15 bp, Homo sapiens
tgagaatttatgaac

SEQ ID NO: 177061 - DNA, 15 bp, Homo sapiens
gagaatttatgaaca

SEQ ID NO: 177062 - DNA, 15 bp, Homo sapiens
agaatttatgaacac

SEQ ID NO: 177063 - DNA, 15 bp, Homo sapiens
gaatttatgaacaca

SEQ ID NO: 177064 - DNA, 15 bp, Homo sapiens
aatttatgaacacaa

SEQ ID NO: 177065 - DNA, 15 bp, Homo sapiens
atttatgaacacaaa

SEQ ID NO: 177066 - DNA, 15 bp, Homo sapiens
tttatgaacacaaag

SEQ ID NO: 177067 - DNA, 15 bp, Homo sapiens
ttatgaacacaaaga

SEQ ID NO: 177068 - DNA, 15 bp, Homo sapiens
tatgaacacaaagaa

SEQ ID NO: 177069 - DNA, 15 bp, Homo sapiens
atgaacacaaagaag

SEQ ID NO: 177070 - DNA, 15 bp, Homo sapiens
tgaacacaaagaagg

SEQ ID NO: 177071 - DNA, 15 bp, Homo sapiens
gaacacaaagaagga

SEQ ID NO: 177072 - DNA, 15 bp, Homo sapiens
aacacaaagaaggaa

SEQ ID NO: 177073 - DNA, 15 bp, Homo sapiens
acacaaagaaggaaa

SEQ ID NO: 177074 - DNA, 15 bp, Homo sapiens
cacaaagaaggaaac

SEQ ID NO: 177075 - DNA, 15 bp, Homo sapiens
acaaagaaggaaaca

SEQ ID NO: 177076 - DNA, 15 bp, Homo sapiens
caaagaaggaaacaa

SEQ ID NO: 177077 - DNA, 15 bp, Homo sapiens
aaagaaggaaacaac

SEQ ID NO: 177078 - DNA, 15 bp, Homo sapiens
aagaaggaaacaaca

SEQ ID NO: 177079 - DNA, 15 bp, Homo sapiens
agaaggaaacaacag

SEQ ID NO: 177080 - DNA, 15 bp, Homo sapiens
gaaggaaacaacaga

SEQ ID NO: 177081 - DNA, 15 bp, Homo sapiens
aaggaaacaacagac

SEQ ID NO: 177082 - DNA, 15 bp, Homo sapiens
aggaaacaacagaca

SEQ ID NO: 177083 - DNA, 15 bp, Homo sapiens
ggaaacaacagacac

SEQ ID NO: 177084 - DNA, 15 bp, Homo sapiens
gaaacaacagacact

SEQ ID NO: 177085 - DNA, 15 bp, Homo sapiens
aaacaacagacactg

SEQ ID NO: 177086 - DNA, 15 bp, Homo sapiens
aacaacagacactgg

SEQ ID NO: 177087 - DNA, 15 bp, Homo sapiens
acaacagacactggg

SEQ ID NO: 177088 - DNA, 15 bp, Homo sapiens
caacagacactgggg

SEQ ID NO: 177089 - DNA, 15 bp, Homo sapiens
aacagacactggggt

SEQ ID NO: 177090 - DNA, 15 bp, Homo sapiens
acagacactggggtc

SEQ ID NO: 177091 - DNA, 15 bp, Homo sapiens
cagacactggggtct

SEQ ID NO: 177092 - DNA, 15 bp, Homo sapiens
agacactggggtcta

SEQ ID NO: 177093 - DNA, 15 bp, Homo sapiens
gacactggggtctac

SEQ ID NO: 177094 - DNA, 15 bp, Homo sapiens
acactggggtctact

SEQ ID NO: 177095 - DNA, 15 bp, Homo sapiens
cactggggtctactt

SEQ ID NO: 177096 - DNA, 15 bp, Homo sapiens
actggggtctacttg

SEQ ID NO: 177097 - DNA, 15 bp, Homo sapiens
ctggggtctacttga

SEQ ID NO: 177098 - DNA, 15 bp, Homo sapiens
tggggtctacttgag

SEQ ID NO: 177099 - DNA, 15 bp, Homo sapiens
ggggtctacttgaga

SEQ ID NO: 177100 - DNA, 15 bp, Homo sapiens
gggtctacttgagaa

SEQ ID NO: 177101 - DNA, 15 bp, Homo sapiens
ggtctacttgagaat

SEQ ID NO: 177102 - DNA, 15 bp, Homo sapiens
gtctacttgagaatg

SEQ ID NO: 177103 - DNA, 15 bp, Homo sapiens
tctacttgagaatgg

SEQ ID NO: 177104 - DNA, 15 bp, Homo sapiens
ctacttgagaatgga

SEQ ID NO: 177105 - DNA, 15 bp, Homo sapiens
tacttgagaatggaa

SEQ ID NO: 177106 - DNA, 15 bp, Homo sapiens
acttgagaatggaag

SEQ ID NO: 177107 - DNA, 15 bp, Homo sapiens
cttgagaatggaaga

SEQ ID NO: 177108 - DNA, 15 bp, Homo sapiens
ttgagaatggaagat

SEQ ID NO: 177109 - DNA, 15 bp, Homo sapiens
tgagaatggaagatg

SEQ ID NO: 177110 - DNA, 15 bp, Homo sapiens
gagaatggaagatgg

SEQ ID NO: 177111 - DNA, 15 bp, Homo sapiens
agaatggaagatggg

SEQ ID NO: 177112 - DNA, 15 bp, Homo sapiens
gaatggaagatggga

SEQ ID NO: 177113 - DNA, 15 bp, Homo sapiens
aatggaagatgggag

SEQ ID NO: 177114 - DNA, 15 bp, Homo sapiens
atggaagatgggagg

SEQ ID NO: 177115 - DNA, 15 bp, Homo sapiens
tggaagatgggagga

SEQ ID NO: 177116 - DNA, 15 bp, Homo sapiens
ggaagatgggaggag

SEQ ID NO: 177117 - DNA, 15 bp, Homo sapiens
gaagatgggaggagg

SEQ ID NO: 177118 - DNA, 15 bp, Homo sapiens
aagatgggaggaggg

SEQ ID NO: 177119 - DNA, 15 bp, Homo sapiens
agatgggaggaggga

SEQ ID NO: 177120 - DNA, 15 bp, Homo sapiens
gatgggaggagggag

SEQ ID NO: 177121 - DNA, 15 bp, Homo sapiens
atgggaggagggaga

SEQ ID NO: 177122 - DNA, 15 bp, Homo sapiens
tgggaggagggagag

SEQ ID NO: 177123 - DNA, 15 bp, Homo sapiens
gggaggagggagagg

SEQ ID NO: 177124 - DNA, 15 bp, Homo sapiens
ggaggagggagagga

SEQ ID NO: 177125 - DNA, 15 bp, Homo sapiens
gaggagggagaggat

SEQ ID NO: 177126 - DNA, 15 bp, Homo sapiens
aggagggagaggatt

SEQ ID NO: 177127 - DNA, 15 bp, Homo sapiens
ggagggagaggatta

SEQ ID NO: 177128 - DNA, 15 bp, Homo sapiens
gagggagaggattag

SEQ ID NO: 177129 - DNA, 15 bp, Homo sapiens
agggagaggattaga

SEQ ID NO: 177130 - DNA, 15 bp, Homo sapiens
gggagaggattagaa

SEQ ID NO: 177131 - DNA, 15 bp, Homo sapiens
ggagaggattagaaa

SEQ ID NO: 177132 - DNA, 15 bp, Homo sapiens
gagaggattagaaaa

SEQ ID NO: 177133 - DNA, 15 bp, Homo sapiens
agaggattagaaaag

SEQ ID NO: 177134 - DNA, 15 bp, Homo sapiens
gaggattagaaaaga

SEQ ID NO: 177135 - DNA, 15 bp, Homo sapiens
aggattagaaaagat

SEQ ID NO: 177136 - DNA, 15 bp, Homo sapiens
ggattagaaaagata

SEQ ID NO: 177137 - DNA, 15 bp, Homo sapiens
gattagaaaagataa

SEQ ID NO: 177138 - DNA, 15 bp, Homo sapiens
attagaaaagataac

SEQ ID NO: 177139 - DNA, 15 bp, Homo sapiens
ttagaaaagataaca

SEQ ID NO: 177140 - DNA, 15 bp, Homo sapiens
tagaaaagataacaa

SEQ ID NO: 177141 - DNA, 15 bp, Homo sapiens
agaaaagataacaat

SEQ ID NO: 177142 - DNA, 15 bp, Homo sapiens
gaaaagataacaatt

SEQ ID NO: 177143 - DNA, 15 bp, Homo sapiens
aaaagataacaattg

SEQ ID NO: 177144 - DNA, 15 bp, Homo sapiens
aaagataacaattgg

SEQ ID NO: 177145 - DNA, 15 bp, Homo sapiens
aagataacaattggg

SEQ ID NO: 177146 - DNA, 15 bp, Homo sapiens
agataacaattgggt

SEQ ID NO: 177147 - DNA, 15 bp, Homo sapiens
gataacaattgggta

SEQ ID NO: 177148 - DNA, 15 bp, Homo sapiens
ataacaattgggtac

SEQ ID NO: 177149 - DNA, 15 bp, Homo sapiens
taacaattgggtact

SEQ ID NO: 177150 - DNA, 15 bp, Homo sapiens
aacaattgggtactg

SEQ ID NO: 177151 - DNA, 15 bp, Homo sapiens
acaattgggtactgg

SEQ ID NO: 177152 - DNA, 15 bp, Homo sapiens
caattgggtactggg

SEQ ID NO: 177153 - DNA, 15 bp, Homo sapiens
aattgggtactgggc

SEQ ID NO: 177154 - DNA, 15 bp, Homo sapiens
attgggtactgggct

SEQ ID NO: 177155 - DNA, 15 bp, Homo sapiens
ttgggtactgggctt

SEQ ID NO: 177156 - DNA, 15 bp, Homo sapiens
tgggtactgggctta

SEQ ID NO: 177157 - DNA, 15 bp, Homo sapiens
gggtactgggcttaa

SEQ ID NO: 177158 - DNA, 15 bp, Homo sapiens
ggtactgggcttaat

SEQ ID NO: 177159 - DNA, 15 bp, Homo sapiens
gtactgggcttaata

SEQ ID NO: 177160 - DNA, 15 bp, Homo sapiens
tactgggcttaatac

SEQ ID NO: 177161 - DNA, 15 bp, Homo sapiens
actgggcttaatacc

SEQ ID NO: 177162 - DNA, 15 bp, Homo sapiens
ctgggcttaatacct

SEQ ID NO: 177163 - DNA, 15 bp, Homo sapiens
tgggcttaatacctg

SEQ ID NO: 177164 - DNA, 15 bp, Homo sapiens
gggcttaatacctga

SEQ ID NO: 177165 - DNA, 15 bp, Homo sapiens
ggcttaatacctgag

SEQ ID NO: 177166 - DNA, 15 bp, Homo sapiens
gcttaatacctgagt

SEQ ID NO: 177167 - DNA, 15 bp, Homo sapiens
cttaatacctgagtg

SEQ ID NO: 177168 - DNA, 15 bp, Homo sapiens
ttaatacctgagtga

SEQ ID NO: 177169 - DNA, 15 bp, Homo sapiens
taatacctgagtgat

SEQ ID NO: 177170 - DNA, 15 bp, Homo sapiens
aatacctgagtgatt

SEQ ID NO: 177171 - DNA, 15 bp, Homo sapiens
atacctgagtgatta

SEQ ID NO: 177172 - DNA, 15 bp, Homo sapiens
tacctgagtgattaa

SEQ ID NO: 177173 - DNA, 15 bp, Homo sapiens
acctgagtgattaaa

SEQ ID NO: 177174 - DNA, 15 bp, Homo sapiens
cctgagtgattaaat

SEQ ID NO: 177175 - DNA, 15 bp, Homo sapiens
ctgagtgattaaata

SEQ ID NO: 177176 - DNA, 15 bp, Homo sapiens
tgagtgattaaataa

SEQ ID NO: 177177 - DNA, 15 bp, Homo sapiens
gagtgattaaataat

SEQ ID NO: 177178 - DNA, 15 bp, Homo sapiens
agtgattaaataatc

SEQ ID NO: 177179 - DNA, 15 bp, Homo sapiens
gtgattaaataatct

SEQ ID NO: 177180 - DNA, 15 bp, Homo sapiens
tgattaaataatctg

SEQ ID NO: 177181 - DNA, 15 bp, Homo sapiens
gattaaataatctgt

SEQ ID NO: 177182 - DNA, 15 bp, Homo sapiens
attaaataatctgta

SEQ ID NO: 177183 - DNA, 15 bp, Homo sapiens
ttaaataatctgtac

SEQ ID NO: 177184 - DNA, 15 bp, Homo sapiens
taaataatctgtaca

SEQ ID NO: 177185 - DNA, 15 bp, Homo sapiens
aaataatctgtacaa

SEQ ID NO: 177186 - DNA, 15 bp, Homo sapiens
aataatctgtacaac

SEQ ID NO: 177187 - DNA, 15 bp, Homo sapiens
ataatctgtacaaca

SEQ ID NO: 177188 - DNA, 15 bp, Homo sapiens
taatctgtacaacaa

SEQ ID NO: 177189 - DNA, 15 bp, Homo sapiens
aatctgtacaacaaa

SEQ ID NO: 177190 - DNA, 15 bp, Homo sapiens
atctgtacaacaaac

SEQ ID NO: 177191 - DNA, 15 bp, Homo sapiens
tctgtacaacaaacc

SEQ ID NO: 177192 - DNA, 15 bp, Homo sapiens
ctgtacaacaaaccc

SEQ ID NO: 177193 - DNA, 15 bp, Homo sapiens
tgtacaacaaacccc

SEQ ID NO: 177194 - DNA, 15 bp, Homo sapiens
gtacaacaaaccccc

SEQ ID NO: 177195 - DNA, 15 bp, Homo sapiens
tacaacaaaccccca

SEQ ID NO: 177196 - DNA, 15 bp, Homo sapiens
acaacaaacccccat

SEQ ID NO: 177197 - DNA, 15 bp, Homo sapiens
caacaaacccccatg

SEQ ID NO: 177198 - DNA, 15 bp, Homo sapiens
aacaaacccccatga

SEQ ID NO: 177199 - DNA, 15 bp, Homo sapiens
acaaacccccatgac

SEQ ID NO: 177200 - DNA, 15 bp, Homo sapiens
caaacccccatgaca

SEQ ID NO: 177201 - DNA, 15 bp, Homo sapiens
aaacccccatgacat

SEQ ID NO: 177202 - DNA, 15 bp, Homo sapiens
aacccccatgacatg

SEQ ID NO: 177203 - DNA, 15 bp, Homo sapiens
acccccatgacatgg

SEQ ID NO: 177204 - DNA, 15 bp, Homo sapiens
cccccatgacatggg

SEQ ID NO: 177205 - DNA, 15 bp, Homo sapiens
ccccatgacatgggt

SEQ ID NO: 177206 - DNA, 15 bp, Homo sapiens
cccatgacatgggtt

SEQ ID NO: 177207 - DNA, 15 bp, Homo sapiens
ccatgacatgggttt

SEQ ID NO: 177208 - DNA, 15 bp, Homo sapiens
catgacatgggttta

SEQ ID NO: 177209 - DNA, 15 bp, Homo sapiens
atgacatgggtttac

SEQ ID NO: 177210 - DNA, 15 bp, Homo sapiens
tgacatgggtttacc

SEQ ID NO: 177211 - DNA, 15 bp, Homo sapiens
gacatgggtttacct

SEQ ID NO: 177212 - DNA, 15 bp, Homo sapiens
acatgggtttaccta

SEQ ID NO: 177213 - DNA, 15 bp, Homo sapiens
catgggtttacctaa

SEQ ID NO: 177214 - DNA, 15 bp, Homo sapiens
atgggtttacctaag

SEQ ID NO: 177215 - DNA, 15 bp, Homo sapiens
tgggtttacctaagt

SEQ ID NO: 177216 - DNA, 15 bp, Homo sapiens
gggtttacctaagta

SEQ ID NO: 177217 - DNA, 15 bp, Homo sapiens
ggtttacctaagtaa

SEQ ID NO: 177218 - DNA, 15 bp, Homo sapiens
gtttacctaagtaac

SEQ ID NO: 177219 - DNA, 15 bp, Homo sapiens
tttacctaagtaaca

SEQ ID NO: 177220 - DNA, 15 bp, Homo sapiens
ttacctaagtaacaa

SEQ ID NO: 177221 - DNA, 15 bp, Homo sapiens
tacctaagtaacaaa

SEQ ID NO: 177222 - DNA, 15 bp, Homo sapiens
acctaagtaacaaat

SEQ ID NO: 177223 - DNA, 15 bp, Homo sapiens
cctaagtaacaaatc

SEQ ID NO: 177224 - DNA, 15 bp, Homo sapiens
ctaagtaacaaatct

SEQ ID NO: 177225 - DNA, 15 bp, Homo sapiens
taagtaacaaatctt

SEQ ID NO: 177226 - DNA, 15 bp, Homo sapiens
aagtaacaaatcttc

SEQ ID NO: 177227 - DNA, 15 bp, Homo sapiens
agtaacaaatcttca

SEQ ID NO: 177228 - DNA, 15 bp, Homo sapiens
gtaacaaatcttcac

SEQ ID NO: 177229 - DNA, 15 bp, Homo sapiens
taacaaatcttcaca

SEQ ID NO: 177230 - DNA, 15 bp, Homo sapiens
aacaaatcttcacat

SEQ ID NO: 177231 - DNA, 15 bp, Homo sapiens
acaaatcttcacatg

SEQ ID NO: 177232 - DNA, 15 bp, Homo sapiens
caaatcttcacatgt

SEQ ID NO: 177233 - DNA, 15 bp, Homo sapiens
aaatcttcacatgta

SEQ ID NO: 177234 - DNA, 15 bp, Homo sapiens
aatcttcacatgtac

SEQ ID NO: 177235 - DNA, 15 bp, Homo sapiens
atcttcacatgtacc

SEQ ID NO: 177236 - DNA, 15 bp, Homo sapiens
tcttcacatgtaccc

SEQ ID NO: 177237 - DNA, 15 bp, Homo sapiens
cttcacatgtacccc

SEQ ID NO: 177238 - DNA, 15 bp, Homo sapiens
ttcacatgtaccccg

SEQ ID NO: 177239 - DNA, 15 bp, Homo sapiens
tcacatgtaccccgt

SEQ ID NO: 177240 - DNA, 15 bp, Homo sapiens
cacatgtaccccgtg

SEQ ID NO: 177241 - DNA, 15 bp, Homo sapiens
acatgtaccccgtga

SEQ ID NO: 177242 - DNA, 15 bp, Homo sapiens
catgtaccccgtgaa

SEQ ID NO: 177243 - DNA, 15 bp, Homo sapiens
atgtaccccgtgaac

SEQ ID NO: 177244 - DNA, 15 bp, Homo sapiens
tgtaccccgtgaacc

SEQ ID NO: 177245 - DNA, 15 bp, Homo sapiens
gtaccccgtgaacct

SEQ ID NO: 177246 - DNA, 15 bp, Homo sapiens
taccccgtgaaccta

SEQ ID NO: 177247 - DNA, 15 bp, Homo sapiens
accccgtgaacctaa

SEQ ID NO: 177248 - DNA, 15 bp, Homo sapiens
ccccgtgaacctaaa

SEQ ID NO: 177249 - DNA, 15 bp, Homo sapiens
cccgtgaacctaaaa

SEQ ID NO: 177250 - DNA, 15 bp, Homo sapiens
ccgtgaacctaaaat

SEQ ID NO: 177251 - DNA, 15 bp, Homo sapiens
cgtgaacctaaaata

SEQ ID NO: 177252 - DNA, 15 bp, Homo sapiens
gtgaacctaaaataa

SEQ ID NO: 177253 - DNA, 15 bp, Homo sapiens
tgaacctaaaataaa

SEQ ID NO: 177254 - DNA, 15 bp, Homo sapiens
gaacctaaaataaaa

SEQ ID NO: 177255 - DNA, 15 bp, Homo sapiens
aacctaaaataaaag

SEQ ID NO: 177256 - DNA, 15 bp, Homo sapiens
acctaaaataaaagt

SEQ ID NO: 177257 - DNA, 15 bp, Homo sapiens
cctaaaataaaagtt

SEQ ID NO: 177258 - DNA, 15 bp, Homo sapiens
ctaaaataaaagtta

SEQ ID NO: 177259 - DNA, 15 bp, Homo sapiens
taaaataaaagttaa

SEQ ID NO: 177260 - DNA, 15 bp, Homo sapiens
aaaataaaagttaaa

SEQ ID NO: 177261 - DNA, 15 bp, Homo sapiens
aaataaaagttaaaa

SEQ ID NO: 177262 - DNA, 15 bp, Homo sapiens
aataaaagttaaaaa

SEQ ID NO: 177263 - DNA, 15 bp, Homo sapiens
ataaaagttaaaaaa

SEQ ID NO: 177264 - DNA, 15 bp, Homo sapiens
taaaagttaaaaaac

SEQ ID NO: 177265 - DNA, 15 bp, Homo sapiens
aaaagttaaaaaaca

SEQ ID NO: 177266 - DNA, 15 bp, Homo sapiens
aaagttaaaaaacaa

SEQ ID NO: 177267 - DNA, 15 bp, Homo sapiens
aagttaaaaaacaaa

SEQ ID NO: 177268 - DNA, 15 bp, Homo sapiens
agttaaaaaacaaac

SEQ ID NO: 177269 - DNA, 15 bp, Homo sapiens
gttaaaaaacaaaca

SEQ ID NO: 177270 - DNA, 15 bp, Homo sapiens
ttaaaaaacaaacac

SEQ ID NO: 177271 - DNA, 15 bp, Homo sapiens
taaaaaacaaacacc

SEQ ID NO: 177272 - DNA, 15 bp, Homo sapiens
aaaaaacaaacacca

SEQ ID NO: 177273 - DNA, 15 bp, Homo sapiens
aaaaacaaacaccag

SEQ ID NO: 177274 - DNA, 15 bp, Homo sapiens
aaaacaaacaccagt

SEQ ID NO: 177275 - DNA, 15 bp, Homo sapiens
aaacaaacaccagtt

SEQ ID NO: 177276 - DNA, 15 bp, Homo sapiens
aacaaacaccagttc

SEQ ID NO: 177277 - DNA, 15 bp, Homo sapiens
acaaacaccagttca

SEQ ID NO: 177278 - DNA, 15 bp, Homo sapiens
caaacaccagttcag

SEQ ID NO: 177279 - DNA, 15 bp, Homo sapiens
aaacaccagttcagc

SEQ ID NO: 177280 - DNA, 15 bp, Homo sapiens
aacaccagttcagca

SEQ ID NO: 177281 - DNA, 15 bp, Homo sapiens
acaccagttcagcat

SEQ ID NO: 177282 - DNA, 15 bp, Homo sapiens
caccagttcagcatt

SEQ ID NO: 177283 - DNA, 15 bp, Homo sapiens
accagttcagcattt

SEQ ID NO: 177284 - DNA, 15 bp, Homo sapiens
ccagttcagcatttg

SEQ ID NO: 177285 - DNA, 15 bp, Homo sapiens
cagttcagcatttga

SEQ ID NO: 177286 - DNA, 15 bp, Homo sapiens
agttcagcatttgaa

SEQ ID NO: 177287 - DNA, 15 bp, Homo sapiens
gttcagcatttgaaa

SEQ ID NO: 177288 - DNA, 15 bp, Homo sapiens
ttcagcatttgaaaa

SEQ ID NO: 177289 - DNA, 15 bp, Homo sapiens
tcagcatttgaaaaa

SEQ ID NO: 177290 - DNA, 15 bp, Homo sapiens
cagcatttgaaaaag

SEQ ID NO: 177291 - DNA, 15 bp, Homo sapiens
agcatttgaaaaagg

SEQ ID NO: 177292 - DNA, 15 bp, Homo sapiens
gcatttgaaaaaggc

SEQ ID NO: 177293 - DNA, 15 bp, Homo sapiens
catttgaaaaaggct

SEQ ID NO: 177294 - DNA, 15 bp, Homo sapiens
atttgaaaaaggctc

SEQ ID NO: 177295 - DNA, 15 bp, Homo sapiens
tttgaaaaaggctcc

SEQ ID NO: 177296 - DNA, 15 bp, Homo sapiens
ttgaaaaaggctcca

SEQ ID NO: 177297 - DNA, 15 bp, Homo sapiens
tgaaaaaggctccat

SEQ ID NO: 177298 - DNA, 15 bp, Homo sapiens
gaaaaaggctccata

SEQ ID NO: 177299 - DNA, 15 bp, Homo sapiens
aaaaaggctccataa

SEQ ID NO: 177300 - DNA, 15 bp, Homo sapiens
aaaaggctccataaa

SEQ ID NO: 177301 - DNA, 15 bp, Homo sapiens
aaaggctccataaag

SEQ ID NO: 177302 - DNA, 15 bp, Homo sapiens
aaggctccataaagt

SEQ ID NO: 177303 - DNA, 15 bp, Homo sapiens
aggctccataaagta

SEQ ID NO: 177304 - DNA, 15 bp, Homo sapiens
ggctccataaagtat

SEQ ID NO: 177305 - DNA, 15 bp, Homo sapiens
gctccataaagtatt

SEQ ID NO: 177306 - DNA, 15 bp, Homo sapiens
ctccataaagtatta

SEQ ID NO: 177307 - DNA, 15 bp, Homo sapiens
tccataaagtattaa

SEQ ID NO: 177308 - DNA, 15 bp, Homo sapiens
ccataaagtattaac

SEQ ID NO: 177309 - DNA, 15 bp, Homo sapiens
cataaagtattaaca

SEQ ID NO: 177310 - DNA, 15 bp, Homo sapiens
ataaagtattaacat

SEQ ID NO: 177311 - DNA, 15 bp, Homo sapiens
taaagtattaacatt

SEQ ID NO: 177312 - DNA, 15 bp, Homo sapiens
aaagtattaacattc

SEQ ID NO: 177313 - DNA, 15 bp, Homo sapiens
aagtattaacattct

SEQ ID NO: 177314 - DNA, 15 bp, Homo sapiens
agtattaacattcta

SEQ ID NO: 177315 - DNA, 15 bp, Homo sapiens
gtattaacattctaa

SEQ ID NO: 177316 - DNA, 15 bp, Homo sapiens
tattaacattctaaa

SEQ ID NO: 177317 - DNA, 15 bp, Homo sapiens
attaacattctaaaa

SEQ ID NO: 177318 - DNA, 15 bp, Homo sapiens
ttaacattctaaaaa

SEQ ID NO: 177319 - DNA, 15 bp, Homo sapiens
taacattctaaaaaa

SEQ ID NO: 177320 - DNA, 15 bp, Homo sapiens
aacattctaaaaaaa

SEQ ID NO: 177321 - DNA, 15 bp, Homo sapiens
acattctaaaaaaat

SEQ ID NO: 177322 - DNA, 15 bp, Homo sapiens
cattctaaaaaaata

SEQ ID NO: 177323 - DNA, 15 bp, Homo sapiens
attctaaaaaaataa

SEQ ID NO: 177324 - DNA, 15 bp, Homo sapiens
ttctaaaaaaataag

SEQ ID NO: 177325 - DNA, 15 bp, Homo sapiens
tctaaaaaaataaga

SEQ ID NO: 177326 - DNA, 15 bp, Homo sapiens
ctaaaaaaataagat

SEQ ID NO: 177327 - DNA, 15 bp, Homo sapiens
taaaaaaataagatg

SEQ ID NO: 177328 - DNA, 15 bp, Homo sapiens
aaaaaaataagatgt

SEQ ID NO: 177329 - DNA, 15 bp, Homo sapiens
aaaaaataagatgta

SEQ ID NO: 177330 - DNA, 15 bp, Homo sapiens
aaaaataagatgtaa

SEQ ID NO: 177331 - DNA, 15 bp, Homo sapiens
aaaataagatgtaaa

SEQ ID NO: 177332 - DNA, 15 bp, Homo sapiens
aaataagatgtaaaa

SEQ ID NO: 177333 - DNA, 15 bp, Homo sapiens
aataagatgtaaaat

SEQ ID NO: 177334 - DNA, 15 bp, Homo sapiens
ataagatgtaaaata

SEQ ID NO: 177335 - DNA, 15 bp, Homo sapiens
taagatgtaaaataa

SEQ ID NO: 177336 - DNA, 15 bp, Homo sapiens
aagatgtaaaataag

SEQ ID NO: 177337 - DNA, 15 bp, Homo sapiens
agatgtaaaataaga

SEQ ID NO: 177338 - DNA, 15 bp, Homo sapiens
gatgtaaaataagat

SEQ ID NO: 177339 - DNA, 15 bp, Homo sapiens
atgtaaaataagatg

SEQ ID NO: 177340 - DNA, 15 bp, Homo sapiens
tgtaaaataagatgc

SEQ ID NO: 177341 - DNA, 15 bp, Homo sapiens
gtaaaataagatgct

SEQ ID NO: 177342 - DNA, 15 bp, Homo sapiens
taaaataagatgctt

SEQ ID NO: 177343 - DNA, 15 bp, Homo sapiens
aaaataagatgctta

SEQ ID NO: 177344 - DNA, 15 bp, Homo sapiens
aaataagatgcttat

SEQ ID NO: 177345 - DNA, 15 bp, Homo sapiens
aataagatgcttata

SEQ ID NO: 177346 - DNA, 15 bp, Homo sapiens
ataagatgcttatag

SEQ ID NO: 177347 - DNA, 15 bp, Homo sapiens
taagatgcttataga

SEQ ID NO: 177348 - DNA, 15 bp, Homo sapiens
aagatgcttatagat

SEQ ID NO: 177349 - DNA, 15 bp, Homo sapiens
agatgcttatagatt

SEQ ID NO: 177350 - DNA, 15 bp, Homo sapiens
gatgcttatagattt

SEQ ID NO: 177351 - DNA, 15 bp, Homo sapiens
atgcttatagatttt

SEQ ID NO: 177352 - DNA, 15 bp, Homo sapiens
tgcttatagattttt

SEQ ID NO: 177353 - DNA, 15 bp, Homo sapiens
gcttatagatttttt

SEQ ID NO: 177354 - DNA, 15 bp, Homo sapiens
cttatagattttttc

SEQ ID NO: 177355 - DNA, 15 bp, Homo sapiens
ttatagattttttca

SEQ ID NO: 177356 - DNA, 15 bp, Homo sapiens
tatagattttttcaa

SEQ ID NO: 177357 - DNA, 15 bp, Homo sapiens
atagattttttcaat

SEQ ID NO: 177358 - DNA, 15 bp, Homo sapiens
tagattttttcaatc

SEQ ID NO: 177359 - DNA, 15 bp, Homo sapiens
agattttttcaatcc

SEQ ID NO: 177360 - DNA, 15 bp, Homo sapiens
gattttttcaatcct

SEQ ID NO: 177361 - DNA, 15 bp, Homo sapiens
attttttcaatccta

SEQ ID NO: 177362 - DNA, 15 bp, Homo sapiens
ttttttcaatcctat

SEQ ID NO: 177363 - DNA, 15 bp, Homo sapiens
tttttcaatcctata

SEQ ID NO: 177364 - DNA, 15 bp, Homo sapiens
ttttcaatcctataa

SEQ ID NO: 177365 - DNA, 15 bp, Homo sapiens
tttcaatcctataaa

SEQ ID NO: 177366 - DNA, 15 bp, Homo sapiens
ttcaatcctataaac

SEQ ID NO: 177367 - DNA, 15 bp, Homo sapiens
tcaatcctataaaca

SEQ ID NO: 177368 - DNA, 15 bp, Homo sapiens
caatcctataaacaa

SEQ ID NO: 177369 - DNA, 15 bp, Homo sapiens
aatcctataaacaac

SEQ ID NO: 177370 - DNA, 15 bp, Homo sapiens
atcctataaacaaca

SEQ ID NO: 177371 - DNA, 15 bp, Homo sapiens
tcctataaacaacaa

SEQ ID NO: 177372 - DNA, 15 bp, Homo sapiens
cctataaacaacaaa

SEQ ID NO: 177373 - DNA, 15 bp, Homo sapiens
ctataaacaacaaac

SEQ ID NO: 177374 - DNA, 15 bp, Homo sapiens
tataaacaacaaact

SEQ ID NO: 177375 - DNA, 15 bp, Homo sapiens
ataaacaacaaactc

SEQ ID NO: 177376 - DNA, 15 bp, Homo sapiens
taaacaacaaactct

SEQ ID NO: 177377 - DNA, 15 bp, Homo sapiens
aaacaacaaactcta

SEQ ID NO: 177378 - DNA, 15 bp, Homo sapiens
aacaacaaactctaa

SEQ ID NO: 177379 - DNA, 15 bp, Homo sapiens
acaacaaactctaaa

SEQ ID NO: 177380 - DNA, 15 bp, Homo sapiens
caacaaactctaaaa

SEQ ID NO: 177381 - DNA, 15 bp, Homo sapiens
aacaaactctaaaaa

SEQ ID NO: 177382 - DNA, 15 bp, Homo sapiens
acaaactctaaaaat

SEQ ID NO: 177383 - DNA, 15 bp, Homo sapiens
caaactctaaaaatt

SEQ ID NO: 177384 - DNA, 15 bp, Homo sapiens
aaactctaaaaattt

SEQ ID NO: 177385 - DNA, 15 bp, Homo sapiens
aactctaaaaatttg

SEQ ID NO: 177386 - DNA, 15 bp, Homo sapiens
actctaaaaatttgg

SEQ ID NO: 177387 - DNA, 15 bp, Homo sapiens
ctctaaaaatttgga

SEQ ID NO: 177388 - DNA, 15 bp, Homo sapiens
tctaaaaatttggag

SEQ ID NO: 177389 - DNA, 15 bp, Homo sapiens
ctaaaaatttggaga

SEQ ID NO: 177390 - DNA, 15 bp, Homo sapiens
taaaaatttggagat

SEQ ID NO: 177391 - DNA, 15 bp, Homo sapiens
aaaaatttggagata

SEQ ID NO: 177392 - DNA, 15 bp, Homo sapiens
aaaatttggagataa

SEQ ID NO: 177393 - DNA, 15 bp, Homo sapiens
aaatttggagataaa

SEQ ID NO: 177394 - DNA, 15 bp, Homo sapiens
aatttggagataaaa

SEQ ID NO: 177395 - DNA, 15 bp, Homo sapiens
atttggagataaaaa

SEQ ID NO: 177396 - DNA, 15 bp, Homo sapiens
tttggagataaaaat

SEQ ID NO: 177397 - DNA, 15 bp, Homo sapiens
ttggagataaaaatt

SEQ ID NO: 177398 - DNA, 15 bp, Homo sapiens
tggagataaaaatta

SEQ ID NO: 177399 - DNA, 15 bp, Homo sapiens
ggagataaaaattaa

SEQ ID NO: 177400 - DNA, 15 bp, Homo sapiens
gagataaaaattaaa

SEQ ID NO: 177401 - DNA, 15 bp, Homo sapiens
agataaaaattaaaa

SEQ ID NO: 177402 - DNA, 15 bp, Homo sapiens
gataaaaattaaaac

SEQ ID NO: 177403 - DNA, 15 bp, Homo sapiens
ataaaaattaaaaca

SEQ ID NO: 177404 - DNA, 15 bp, Homo sapiens
taaaaattaaaacag

SEQ ID NO: 177405 - DNA, 15 bp, Homo sapiens
aaaaattaaaacagg

SEQ ID NO: 177406 - DNA, 15 bp, Homo sapiens
aaaattaaaacaggt

SEQ ID NO: 177407 - DNA, 15 bp, Homo sapiens
aaattaaaacaggta

SEQ ID NO: 177408 - DNA, 15 bp, Homo sapiens
aattaaaacaggtac

SEQ ID NO: 177409 - DNA, 15 bp, Homo sapiens
attaaaacaggtacc

SEQ ID NO: 177410 - DNA, 15 bp, Homo sapiens
ttaaaacaggtacca

SEQ ID NO: 177411 - DNA, 15 bp, Homo sapiens
taaaacaggtaccaa

SEQ ID NO: 177412 - DNA, 15 bp, Homo sapiens
aaaacaggtaccaaa

SEQ ID NO: 177413 - DNA, 15 bp, Homo sapiens
aaacaggtaccaaaa

SEQ ID NO: 177414 - DNA, 15 bp, Homo sapiens
aacaggtaccaaaat

SEQ ID NO: 177415 - DNA, 15 bp, Homo sapiens
acaggtaccaaaatg

SEQ ID NO: 177416 - DNA, 15 bp, Homo sapiens
caggtaccaaaatga

SEQ ID NO: 177417 - DNA, 15 bp, Homo sapiens
aggtaccaaaatgaa

SEQ ID NO: 177418 - DNA, 15 bp, Homo sapiens
ggtaccaaaatgaaa

SEQ ID NO: 177419 - DNA, 15 bp, Homo sapiens
gtaccaaaatgaaaa

SEQ ID NO: 177420 - DNA, 15 bp, Homo sapiens
taccaaaatgaaaaa

SEQ ID NO: 177421 - DNA, 15 bp, Homo sapiens
accaaaatgaaaaag

SEQ ID NO: 177422 - DNA, 15 bp, Homo sapiens
ccaaaatgaaaaaga

SEQ ID NO: 177423 - DNA, 15 bp, Homo sapiens
caaaatgaaaaagag

SEQ ID NO: 177424 - DNA, 15 bp, Homo sapiens
aaaatgaaaaagaga

SEQ ID NO: 177425 - DNA, 15 bp, Homo sapiens
aaatgaaaaagagag

SEQ ID NO: 177426 - DNA, 15 bp, Homo sapiens
aatgaaaaagagaga

SEQ ID NO: 177427 - DNA, 15 bp, Homo sapiens
atgaaaaagagagac

SEQ ID NO: 177428 - DNA, 15 bp, Homo sapiens
tgaaaaagagagacg

SEQ ID NO: 177429 - DNA, 15 bp, Homo sapiens
gaaaaagagagacga

SEQ ID NO: 177430 - DNA, 15 bp, Homo sapiens
aaaaagagagacgaa

SEQ ID NO: 177431 - DNA, 15 bp, Homo sapiens
aaaagagagacgaac

SEQ ID NO: 177432 - DNA, 15 bp, Homo sapiens
aaagagagacgaact

SEQ ID NO: 177433 - DNA, 15 bp, Homo sapiens
aagagagacgaactg

SEQ ID NO: 177434 - DNA, 15 bp, Homo sapiens
agagagacgaactga

SEQ ID NO: 177435 - DNA, 15 bp, Homo sapiens
gagagacgaactgat

SEQ ID NO: 177436 - DNA, 15 bp, Homo sapiens
agagacgaactgatc

SEQ ID NO: 177437 - DNA, 15 bp, Homo sapiens
gagacgaactgatct

SEQ ID NO: 177438 - DNA, 15 bp, Homo sapiens
agacgaactgatcta

SEQ ID NO: 177439 - DNA, 15 bp, Homo sapiens
gacgaactgatctaa

SEQ ID NO: 177440 - DNA, 15 bp, Homo sapiens
acgaactgatctaat

SEQ ID NO: 177441 - DNA, 15 bp, Homo sapiens
cgaactgatctaata

SEQ ID NO: 177442 - DNA, 15 bp, Homo sapiens
gaactgatctaatac

SEQ ID NO: 177443 - DNA, 15 bp, Homo sapiens
aactgatctaataca

SEQ ID NO: 177444 - DNA, 15 bp, Homo sapiens
actgatctaatacac

SEQ ID NO: 177445 - DNA, 15 bp, Homo sapiens
ctgatctaatacaca

SEQ ID NO: 177446 - DNA, 15 bp, Homo sapiens
tgatctaatacacat

SEQ ID NO: 177447 - DNA, 15 bp, Homo sapiens
gatctaatacacatg

SEQ ID NO: 177448 - DNA, 15 bp, Homo sapiens
atctaatacacatgg

SEQ ID NO: 177449 - DNA, 15 bp, Homo sapiens
tctaatacacatggc

SEQ ID NO: 177450 - DNA, 15 bp, Homo sapiens
ctaatacacatggca

SEQ ID NO: 177451 - DNA, 15 bp, Homo sapiens
taatacacatggcaa

SEQ ID NO: 177452 - DNA, 15 bp, Homo sapiens
aatacacatggcaac

SEQ ID NO: 177453 - DNA, 15 bp, Homo sapiens
atacacatggcaact

SEQ ID NO: 177454 - DNA, 15 bp, Homo sapiens
tacacatggcaactt

SEQ ID NO: 177455 - DNA, 15 bp, Homo sapiens
acacatggcaacttc

SEQ ID NO: 177456 - DNA, 15 bp, Homo sapiens
cacatggcaacttca

SEQ ID NO: 177457 - DNA, 15 bp, Homo sapiens
acatggcaacttcat

SEQ ID NO: 177458 - DNA, 15 bp, Homo sapiens
catggcaacttcata

SEQ ID NO: 177459 - DNA, 15 bp, Homo sapiens
atggcaacttcatag

SEQ ID NO: 177460 - DNA, 15 bp, Homo sapiens
tggcaacttcataga

SEQ ID NO: 177461 - DNA, 15 bp, Homo sapiens
ggcaacttcatagaa

SEQ ID NO: 177462 - DNA, 15 bp, Homo sapiens
gcaacttcatagaac

SEQ ID NO: 177463 - DNA, 15 bp, Homo sapiens
caacttcatagaaca

SEQ ID NO: 177464 - DNA, 15 bp, Homo sapiens
aacttcatagaacaa

SEQ ID NO: 177465 - DNA, 15 bp, Homo sapiens
acttcatagaacaaa

SEQ ID NO: 177466 - DNA, 15 bp, Homo sapiens
cttcatagaacaaat

SEQ ID NO: 177467 - DNA, 15 bp, Homo sapiens
ttcatagaacaaatg

SEQ ID NO: 177468 - DNA, 15 bp, Homo sapiens
tcatagaacaaatgg

SEQ ID NO: 177469 - DNA, 15 bp, Homo sapiens
catagaacaaatgga

SEQ ID NO: 177470 - DNA, 15 bp, Homo sapiens
atagaacaaatggac

SEQ ID NO: 177471 - DNA, 15 bp, Homo sapiens
tagaacaaatggaca

SEQ ID NO: 177472 - DNA, 15 bp, Homo sapiens
agaacaaatggacaa

SEQ ID NO: 177473 - DNA, 15 bp, Homo sapiens
gaacaaatggacaac

SEQ ID NO: 177474 - DNA, 15 bp, Homo sapiens
aacaaatggacaact

SEQ ID NO: 177475 - DNA, 15 bp, Homo sapiens
acaaatggacaactg

SEQ ID NO: 177476 - DNA, 15 bp, Homo sapiens
caaatggacaactgt

SEQ ID NO: 177477 - DNA, 15 bp, Homo sapiens
aaatggacaactgta

SEQ ID NO: 177478 - DNA, 15 bp, Homo sapiens
aatggacaactgtac

SEQ ID NO: 177479 - DNA, 15 bp, Homo sapiens
atggacaactgtacc

SEQ ID NO: 177480 - DNA, 15 bp, Homo sapiens
tggacaactgtacct

SEQ ID NO: 177481 - DNA, 15 bp, Homo sapiens
ggacaactgtacctc

SEQ ID NO: 177482 - DNA, 15 bp, Homo sapiens
gacaactgtacctct

SEQ ID NO: 177483 - DNA, 15 bp, Homo sapiens
acaactgtacctctg

SEQ ID NO: 177484 - DNA, 15 bp, Homo sapiens
caactgtacctctgt

SEQ ID NO: 177485 - DNA, 15 bp, Homo sapiens
aactgtacctctgtt

SEQ ID NO: 177486 - DNA, 15 bp, Homo sapiens
actgtacctctgttg

SEQ ID NO: 177487 - DNA, 15 bp, Homo sapiens
ctgtacctctgttga

SEQ ID NO: 177488 - DNA, 15 bp, Homo sapiens
tgtacctctgttgag

SEQ ID NO: 177489 - DNA, 15 bp, Homo sapiens
gtacctctgttgagt

SEQ ID NO: 177490 - DNA, 15 bp, Homo sapiens
tacctctgttgagtt

SEQ ID NO: 177491 - DNA, 15 bp, Homo sapiens
acctctgttgagttc

SEQ ID NO: 177492 - DNA, 15 bp, Homo sapiens
cctctgttgagttct

SEQ ID NO: 177493 - DNA, 15 bp, Homo sapiens
ctctgttgagttctc

SEQ ID NO: 177494 - DNA, 15 bp, Homo sapiens
tctgttgagttctcc

SEQ ID NO: 177495 - DNA, 15 bp, Homo sapiens
ctgttgagttctcca

SEQ ID NO: 177496 - DNA, 15 bp, Homo sapiens
tgttgagttctccat

SEQ ID NO: 177497 - DNA, 15 bp, Homo sapiens
gttgagttctccata

SEQ ID NO: 177498 - DNA, 15 bp, Homo sapiens
ttgagttctccatat

SEQ ID NO: 177499 - DNA, 15 bp, Homo sapiens
tgagttctccatatt

SEQ ID NO: 177500 - DNA, 15 bp, Homo sapiens
gagttctccatattc

SEQ ID NO: 177501 - DNA, 15 bp, Homo sapiens
agttctccatattct

SEQ ID NO: 177502 - DNA, 15 bp, Homo sapiens
gttctccatattctg

SEQ ID NO: 177503 - DNA, 15 bp, Homo sapiens
ttctccatattctgt

SEQ ID NO: 177504 - DNA, 15 bp, Homo sapiens
tctccatattctgtg

SEQ ID NO: 177505 - DNA, 15 bp, Homo sapiens
ctccatattctgtgt

SEQ ID NO: 177506 - DNA, 15 bp, Homo sapiens
tccatattctgtgtg

SEQ ID NO: 177507 - DNA, 15 bp, Homo sapiens
ccatattctgtgtgg

SEQ ID NO: 177508 - DNA, 15 bp, Homo sapiens
catattctgtgtgga

SEQ ID NO: 177509 - DNA, 15 bp, Homo sapiens
atattctgtgtggaa

SEQ ID NO: 177510 - DNA, 15 bp, Homo sapiens
tattctgtgtggaaa

SEQ ID NO: 177511 - DNA, 15 bp, Homo sapiens
attctgtgtggaaaa

SEQ ID NO: 177512 - DNA, 15 bp, Homo sapiens
ttctgtgtggaaaac

SEQ ID NO: 177513 - DNA, 15 bp, Homo sapiens
tctgtgtggaaaaca

SEQ ID NO: 177514 - DNA, 15 bp, Homo sapiens
ctgtgtggaaaacac

SEQ ID NO: 177515 - DNA, 15 bp, Homo sapiens
tgtgtggaaaacacc

SEQ ID NO: 177516 - DNA, 15 bp, Homo sapiens
gtgtggaaaacacca

SEQ ID NO: 177517 - DNA, 15 bp, Homo sapiens
tgtggaaaacaccaa

SEQ ID NO: 177518 - DNA, 15 bp, Homo sapiens
gtggaaaacaccaac

SEQ ID NO: 177519 - DNA, 15 bp, Homo sapiens
tggaaaacaccaact

SEQ ID NO: 177520 - DNA, 15 bp, Homo sapiens
ggaaaacaccaacta

SEQ ID NO: 177521 - DNA, 15 bp, Homo sapiens
gaaaacaccaactac

SEQ ID NO: 177522 - DNA, 15 bp, Homo sapiens
aaaacaccaactact

SEQ ID NO: 177523 - DNA, 15 bp, Homo sapiens
aaacaccaactactt

SEQ ID NO: 177524 - DNA, 15 bp, Homo sapiens
aacaccaactacttt

SEQ ID NO: 177525 - DNA, 15 bp, Homo sapiens
acaccaactactttt

SEQ ID NO: 177526 - DNA, 15 bp, Homo sapiens
caccaactacttttg

SEQ ID NO: 177527 - DNA, 15 bp, Homo sapiens
accaactacttttgt

SEQ ID NO: 177528 - DNA, 15 bp, Homo sapiens
ccaactacttttgtg

SEQ ID NO: 177529 - DNA, 15 bp, Homo sapiens
caactacttttgtgt

SEQ ID NO: 177530 - DNA, 15 bp, Homo sapiens
aactacttttgtgta

SEQ ID NO: 177531 - DNA, 15 bp, Homo sapiens
actacttttgtgtag

SEQ ID NO: 177532 - DNA, 15 bp, Homo sapiens
ctacttttgtgtagc

SEQ ID NO: 177533 - DNA, 15 bp, Homo sapiens
tacttttgtgtagcc

SEQ ID NO: 177534 - DNA, 15 bp, Homo sapiens
acttttgtgtagcct

SEQ ID NO: 177535 - DNA, 15 bp, Homo sapiens
cttttgtgtagccta

SEQ ID NO: 177536 - DNA, 15 bp, Homo sapiens
ttttgtgtagcctaa

SEQ ID NO: 177537 - DNA, 15 bp, Homo sapiens
tttgtgtagcctaaa

SEQ ID NO: 177538 - DNA, 15 bp, Homo sapiens
ttgtgtagcctaaat

SEQ ID NO: 177539 - DNA, 15 bp, Homo sapiens
tgtgtagcctaaatt

SEQ ID NO: 177540 - DNA, 15 bp, Homo sapiens
gtgtagcctaaattg

SEQ ID NO: 177541 - DNA, 15 bp, Homo sapiens
tgtagcctaaattga

SEQ ID NO: 177542 - DNA, 15 bp, Homo sapiens
gtagcctaaattgac

SEQ ID NO: 177543 - DNA, 15 bp, Homo sapiens
tagcctaaattgaca

SEQ ID NO: 177544 - DNA, 15 bp, Homo sapiens
agcctaaattgacat

SEQ ID NO: 177545 - DNA, 15 bp, Homo sapiens
gcctaaattgacatg

SEQ ID NO: 177546 - DNA, 15 bp, Homo sapiens
cctaaattgacatgg

SEQ ID NO: 177547 - DNA, 15 bp, Homo sapiens
ctaaattgacatggg

SEQ ID NO: 177548 - DNA, 15 bp, Homo sapiens
taaattgacatgggc

SEQ ID NO: 177549 - DNA, 15 bp, Homo sapiens
aaattgacatgggca

SEQ ID NO: 177550 - DNA, 15 bp, Homo sapiens
aattgacatgggcat

SEQ ID NO: 177551 - DNA, 15 bp, Homo sapiens
attgacatgggcatt

SEQ ID NO: 177552 - DNA, 15 bp, Homo sapiens
ttgacatgggcatta

SEQ ID NO: 177553 - DNA, 15 bp, Homo sapiens
tgacatgggcattaa

SEQ ID NO: 177554 - DNA, 15 bp, Homo sapiens
gacatgggcattaat

SEQ ID NO: 177555 - DNA, 15 bp, Homo sapiens
acatgggcattaatt

SEQ ID NO: 177556 - DNA, 15 bp, Homo sapiens
catgggcattaattg

SEQ ID NO: 177557 - DNA, 15 bp, Homo sapiens
atgggcattaattgc

SEQ ID NO: 177558 - DNA, 15 bp, Homo sapiens
tgggcattaattgct

SEQ ID NO: 177559 - DNA, 15 bp, Homo sapiens
gggcattaattgctc

SEQ ID NO: 177560 - DNA, 15 bp, Homo sapiens
ggcattaattgctct

SEQ ID NO: 177561 - DNA, 15 bp, Homo sapiens
gcattaattgctctt

SEQ ID NO: 177562 - DNA, 15 bp, Homo sapiens
cattaattgctcttt

SEQ ID NO: 177563 - DNA, 15 bp, Homo sapiens
attaattgctctttc

SEQ ID NO: 177564 - DNA, 15 bp, Homo sapiens
ttaattgctctttca

SEQ ID NO: 177565 - DNA, 15 bp, Homo sapiens
taattgctctttcaa

SEQ ID NO: 177566 - DNA, 15 bp, Homo sapiens
aattgctctttcaaa

SEQ ID NO: 177567 - DNA, 15 bp, Homo sapiens
attgctctttcaaat

SEQ ID NO: 177568 - DNA, 15 bp, Homo sapiens
ttgctctttcaaatg

SEQ ID NO: 177569 - DNA, 15 bp, Homo sapiens
tgctctttcaaatgc

SEQ ID NO: 177570 - DNA, 15 bp, Homo sapiens
gctctttcaaatgca

SEQ ID NO: 177571 - DNA, 15 bp, Homo sapiens
ctctttcaaatgcat

SEQ ID NO: 177572 - DNA, 15 bp, Homo sapiens
tctttcaaatgcatc

SEQ ID NO: 177573 - DNA, 15 bp, Homo sapiens
ctttcaaatgcatca

SEQ ID NO: 177574 - DNA, 15 bp, Homo sapiens
tttcaaatgcatcac

SEQ ID NO: 177575 - DNA, 15 bp, Homo sapiens
ttcaaatgcatcacc

SEQ ID NO: 177576 - DNA, 15 bp, Homo sapiens
tcaaatgcatcaccc

SEQ ID NO: 177577 - DNA, 15 bp, Homo sapiens
caaatgcatcacccc

SEQ ID NO: 177578 - DNA, 15 bp, Homo sapiens
aaatgcatcacccca

SEQ ID NO: 177579 - DNA, 15 bp, Homo sapiens
aatgcatcaccccac

SEQ ID NO: 177580 - DNA, 15 bp, Homo sapiens
atgcatcaccccaca

SEQ ID NO: 177581 - DNA, 15 bp, Homo sapiens
tgcatcaccccacag

SEQ ID NO: 177582 - DNA, 15 bp, Homo sapiens
gcatcaccccacaga

SEQ ID NO: 177583 - DNA, 15 bp, Homo sapiens
catcaccccacagag

SEQ ID NO: 177584 - DNA, 15 bp, Homo sapiens
atcaccccacagagc

SEQ ID NO: 177585 - DNA, 15 bp, Homo sapiens
tcaccccacagagct

SEQ ID NO: 177586 - DNA, 15 bp, Homo sapiens
caccccacagagctg

SEQ ID NO: 177587 - DNA, 15 bp, Homo sapiens
accccacagagctgg

SEQ ID NO: 177588 - DNA, 15 bp, Homo sapiens
ccccacagagctggc

SEQ ID NO: 177589 - DNA, 15 bp, Homo sapiens
cccacagagctggcc

SEQ ID NO: 177590 - DNA, 15 bp, Homo sapiens
ccacagagctggccc

SEQ ID NO: 177591 - DNA, 15 bp, Homo sapiens
cacagagctggccca

SEQ ID NO: 177592 - DNA, 15 bp, Homo sapiens
acagagctggcccac

SEQ ID NO: 177593 - DNA, 15 bp, Homo sapiens
cagagctggcccacc

SEQ ID NO: 177594 - DNA, 15 bp, Homo sapiens
agagctggcccacca

SEQ ID NO: 177595 - DNA, 15 bp, Homo sapiens
gagctggcccaccag

SEQ ID NO: 177596 - DNA, 15 bp, Homo sapiens
agctggcccaccagg

SEQ ID NO: 177597 - DNA, 15 bp, Homo sapiens
gctggcccaccaggt

SEQ ID NO: 177598 - DNA, 15 bp, Homo sapiens
ctggcccaccaggtt

SEQ ID NO: 177599 - DNA, 15 bp, Homo sapiens
tggcccaccaggttt

SEQ ID NO: 177600 - DNA, 15 bp, Homo sapiens
ggcccaccaggtttc

SEQ ID NO: 177601 - DNA, 15 bp, Homo sapiens
gcccaccaggtttca

SEQ ID NO: 177602 - DNA, 15 bp, Homo sapiens
cccaccaggtttcat

SEQ ID NO: 177603 - DNA, 15 bp, Homo sapiens
ccaccaggtttcatc

SEQ ID NO: 177604 - DNA, 15 bp, Homo sapiens
caccaggtttcatct

SEQ ID NO: 177605 - DNA, 15 bp, Homo sapiens
accaggtttcatctg

SEQ ID NO: 177606 - DNA, 15 bp, Homo sapiens
ccaggtttcatctga

SEQ ID NO: 177607 - DNA, 15 bp, Homo sapiens
caggtttcatctgaa

SEQ ID NO: 177608 - DNA, 15 bp, Homo sapiens
aggtttcatctgaaa

SEQ ID NO: 177609 - DNA, 15 bp, Homo sapiens
ggtttcatctgaaaa

SEQ ID NO: 177610 - DNA, 15 bp, Homo sapiens
gtttcatctgaaaaa

SEQ ID NO: 177611 - DNA, 15 bp, Homo sapiens
tttcatctgaaaaac

SEQ ID NO: 177612 - DNA, 15 bp, Homo sapiens
ttcatctgaaaaaca

SEQ ID NO: 177613 - DNA, 15 bp, Homo sapiens
tcatctgaaaaacag

SEQ ID NO: 177614 - DNA, 15 bp, Homo sapiens
catctgaaaaacagc

SEQ ID NO: 177615 - DNA, 15 bp, Homo sapiens
atctgaaaaacagct

SEQ ID NO: 177616 - DNA, 15 bp, Homo sapiens
tctgaaaaacagcta

SEQ ID NO: 177617 - DNA, 15 bp, Homo sapiens
ctgaaaaacagctag

SEQ ID NO: 177618 - DNA, 15 bp, Homo sapiens
tgaaaaacagctagt

SEQ ID NO: 177619 - DNA, 15 bp, Homo sapiens
gaaaaacagctagtt

SEQ ID NO: 177620 - DNA, 15 bp, Homo sapiens
aaaaacagctagttc

SEQ ID NO: 177621 - DNA, 15 bp, Homo sapiens
aaaacagctagttca

SEQ ID NO: 177622 - DNA, 15 bp, Homo sapiens
aaacagctagttcat

SEQ ID NO: 177623 - DNA, 15 bp, Homo sapiens
aacagctagttcata

SEQ ID NO: 177624 - DNA, 15 bp, Homo sapiens
acagctagttcatag

SEQ ID NO: 177625 - DNA, 15 bp, Homo sapiens
cagctagttcataga

SEQ ID NO: 177626 - DNA, 15 bp, Homo sapiens
agctagttcatagac

SEQ ID NO: 177627 - DNA, 15 bp, Homo sapiens
gctagttcatagact

SEQ ID NO: 177628 - DNA, 15 bp, Homo sapiens
ctagttcatagactc

SEQ ID NO: 177629 - DNA, 15 bp, Homo sapiens
tagttcatagactcc

SEQ ID NO: 177630 - DNA, 15 bp, Homo sapiens
agttcatagactcct

SEQ ID NO: 177631 - DNA, 15 bp, Homo sapiens
gttcatagactccta

SEQ ID NO: 177632 - DNA, 15 bp, Homo sapiens
ttcatagactcctag

SEQ ID NO: 177633 - DNA, 15 bp, Homo sapiens
tcatagactcctaga

SEQ ID NO: 177634 - DNA, 15 bp, Homo sapiens
catagactcctagaa

SEQ ID NO: 177635 - DNA, 15 bp, Homo sapiens
atagactcctagaat

SEQ ID NO: 177636 - DNA, 15 bp, Homo sapiens
tagactcctagaata

SEQ ID NO: 177637 - DNA, 15 bp, Homo sapiens
agactcctagaatag

SEQ ID NO: 177638 - DNA, 15 bp, Homo sapiens
gactcctagaatagg

SEQ ID NO: 177639 - DNA, 15 bp, Homo sapiens
actcctagaataggg

SEQ ID NO: 177640 - DNA, 15 bp, Homo sapiens
ctcctagaataggga

SEQ ID NO: 177641 - DNA, 15 bp, Homo sapiens
tcctagaatagggag

SEQ ID NO: 177642 - DNA, 15 bp, Homo sapiens
cctagaatagggaga

SEQ ID NO: 177643 - DNA, 15 bp, Homo sapiens
ctagaatagggagaa

SEQ ID NO: 177644 - DNA, 15 bp, Homo sapiens
tagaatagggagaaa

SEQ ID NO: 177645 - DNA, 15 bp, Homo sapiens
agaatagggagaaaa

SEQ ID NO: 177646 - DNA, 15 bp, Homo sapiens
gaatagggagaaaaa

SEQ ID NO: 177647 - DNA, 15 bp, Homo sapiens
aatagggagaaaaat

SEQ ID NO: 177648 - DNA, 15 bp, Homo sapiens
atagggagaaaaata

SEQ ID NO: 177649 - DNA, 15 bp, Homo sapiens
tagggagaaaaataa

SEQ ID NO: 177650 - DNA, 15 bp, Homo sapiens
agggagaaaaataat

SEQ ID NO: 177651 - DNA, 15 bp, Homo sapiens
gggagaaaaataatt

SEQ ID NO: 177652 - DNA, 15 bp, Homo sapiens
ggagaaaaataatta

SEQ ID NO: 177653 - DNA, 15 bp, Homo sapiens
gagaaaaataattat

SEQ ID NO: 177654 - DNA, 15 bp, Homo sapiens
agaaaaataattatt

SEQ ID NO: 177655 - DNA, 15 bp, Homo sapiens
gaaaaataattattt

SEQ ID NO: 177656 - DNA, 15 bp, Homo sapiens
aaaaataattatttc

SEQ ID NO: 177657 - DNA, 15 bp, Homo sapiens
aaaataattatttca

SEQ ID NO: 177658 - DNA, 15 bp, Homo sapiens
aaataattatttcac

SEQ ID NO: 177659 - DNA, 15 bp, Homo sapiens
aataattatttcaca

SEQ ID NO: 177660 - DNA, 15 bp, Homo sapiens
ataattatttcacag

SEQ ID NO: 177661 - DNA, 15 bp, Homo sapiens
taattatttcacaga

SEQ ID NO: 177662 - DNA, 15 bp, Homo sapiens
aattatttcacagaa

SEQ ID NO: 177663 - DNA, 15 bp, Homo sapiens
attatttcacagaag

SEQ ID NO: 177664 - DNA, 15 bp, Homo sapiens
ttatttcacagaaga

SEQ ID NO: 177665 - DNA, 15 bp, Homo sapiens
tatttcacagaagac

SEQ ID NO: 177666 - DNA, 15 bp, Homo sapiens
atttcacagaagaca

SEQ ID NO: 177667 - DNA, 15 bp, Homo sapiens
tttcacagaagacat

SEQ ID NO: 177668 - DNA, 15 bp, Homo sapiens
ttcacagaagacatt

SEQ ID NO: 177669 - DNA, 15 bp, Homo sapiens
tcacagaagacattc

SEQ ID NO: 177670 - DNA, 15 bp, Homo sapiens
cacagaagacattca

SEQ ID NO: 177671 - DNA, 15 bp, Homo sapiens
acagaagacattcaa

SEQ ID NO: 177672 - DNA, 15 bp, Homo sapiens
cagaagacattcaaa

SEQ ID NO: 177673 - DNA, 15 bp, Homo sapiens
agaagacattcaaac

SEQ ID NO: 177674 - DNA, 15 bp, Homo sapiens
gaagacattcaaaca

SEQ ID NO: 177675 - DNA, 15 bp, Homo sapiens
aagacattcaaacaa

SEQ ID NO: 177676 - DNA, 15 bp, Homo sapiens
agacattcaaacaat

SEQ ID NO: 177677 - DNA, 15 bp, Homo sapiens
gacattcaaacaatt

SEQ ID NO: 177678 - DNA, 15 bp, Homo sapiens
acattcaaacaattt

SEQ ID NO: 177679 - DNA, 15 bp, Homo sapiens
cattcaaacaatttc

SEQ ID NO: 177680 - DNA, 15 bp, Homo sapiens
attcaaacaatttct

SEQ ID NO: 177681 - DNA, 15 bp, Homo sapiens
ttcaaacaatttcta

SEQ ID NO: 177682 - DNA, 15 bp, Homo sapiens
tcaaacaatttctaa

SEQ ID NO: 177683 - DNA, 15 bp, Homo sapiens
caaacaatttctaac

SEQ ID NO: 177684 - DNA, 15 bp, Homo sapiens
aaacaatttctaacc

SEQ ID NO: 177685 - DNA, 15 bp, Homo sapiens
aacaatttctaacca

SEQ ID NO: 177686 - DNA, 15 bp, Homo sapiens
acaatttctaaccag

SEQ ID NO: 177687 - DNA, 15 bp, Homo sapiens
caatttctaaccagg

SEQ ID NO: 177688 - DNA, 15 bp, Homo sapiens
aatttctaaccaggt

SEQ ID NO: 177689 - DNA, 15 bp, Homo sapiens
atttctaaccaggtt

SEQ ID NO: 177690 - DNA, 15 bp, Homo sapiens
tttctaaccaggttt

SEQ ID NO: 177691 - DNA, 15 bp, Homo sapiens
ttctaaccaggtttt

SEQ ID NO: 177692 - DNA, 15 bp, Homo sapiens
tctaaccaggttttc

SEQ ID NO: 177693 - DNA, 15 bp, Homo sapiens
ctaaccaggttttcc

SEQ ID NO: 177694 - DNA, 15 bp, Homo sapiens
taaccaggttttcct

SEQ ID NO: 177695 - DNA, 15 bp, Homo sapiens
aaccaggttttcctg

SEQ ID NO: 177696 - DNA, 15 bp, Homo sapiens
accaggttttcctga

SEQ ID NO: 177697 - DNA, 15 bp, Homo sapiens
ccaggttttcctgat

SEQ ID NO: 177698 - DNA, 15 bp, Homo sapiens
caggttttcctgatt

SEQ ID NO: 177699 - DNA, 15 bp, Homo sapiens
aggttttcctgattt

SEQ ID NO: 177700 - DNA, 15 bp, Homo sapiens
ggttttcctgatttc

SEQ ID NO: 177701 - DNA, 15 bp, Homo sapiens
gttttcctgatttca

SEQ ID NO: 177702 - DNA, 15 bp, Homo sapiens
ttttcctgatttcat

SEQ ID NO: 177703 - DNA, 15 bp, Homo sapiens
tttcctgatttcatt

SEQ ID NO: 177704 - DNA, 15 bp, Homo sapiens
ttcctgatttcatta

SEQ ID NO: 177705 - DNA, 15 bp, Homo sapiens
tcctgatttcattag

SEQ ID NO: 177706 - DNA, 15 bp, Homo sapiens
cctgatttcattaga

SEQ ID NO: 177707 - DNA, 15 bp, Homo sapiens
ctgatttcattagaa

SEQ ID NO: 177708 - DNA, 15 bp, Homo sapiens
tgatttcattagaag

SEQ ID NO: 177709 - DNA, 15 bp, Homo sapiens
gatttcattagaagg

SEQ ID NO: 177710 - DNA, 15 bp, Homo sapiens
atttcattagaaggc

SEQ ID NO: 177711 - DNA, 15 bp, Homo sapiens
tttcattagaaggct

SEQ ID NO: 177712 - DNA, 15 bp, Homo sapiens
ttcattagaaggcta

SEQ ID NO: 177713 - DNA, 15 bp, Homo sapiens
tcattagaaggctaa

SEQ ID NO: 177714 - DNA, 15 bp, Homo sapiens
cattagaaggctaac

SEQ ID NO: 177715 - DNA, 15 bp, Homo sapiens
attagaaggctaacc

SEQ ID NO: 177716 - DNA, 15 bp, Homo sapiens
ttagaaggctaacca

SEQ ID NO: 177717 - DNA, 15 bp, Homo sapiens
tagaaggctaaccaa

SEQ ID NO: 177718 - DNA, 15 bp, Homo sapiens
agaaggctaaccaat

SEQ ID NO: 177719 - DNA, 15 bp, Homo sapiens
gaaggctaaccaatg

SEQ ID NO: 177720 - DNA, 15 bp, Homo sapiens
aaggctaaccaatga

SEQ ID NO: 177721 - DNA, 15 bp, Homo sapiens
aggctaaccaatgaa

SEQ ID NO: 177722 - DNA, 15 bp, Homo sapiens
ggctaaccaatgaag

SEQ ID NO: 177723 - DNA, 15 bp, Homo sapiens
gctaaccaatgaagt

SEQ ID NO: 177724 - DNA, 15 bp, Homo sapiens
ctaaccaatgaagtt

SEQ ID NO: 177725 - DNA, 15 bp, Homo sapiens
taaccaatgaagtta

SEQ ID NO: 177726 - DNA, 15 bp, Homo sapiens
aaccaatgaagttag

SEQ ID NO: 177727 - DNA, 15 bp, Homo sapiens
accaatgaagttaga

SEQ ID NO: 177728 - DNA, 15 bp, Homo sapiens
ccaatgaagttagag

SEQ ID NO: 177729 - DNA, 15 bp, Homo sapiens
caatgaagttagagg

SEQ ID NO: 177730 - DNA, 15 bp, Homo sapiens
aatgaagttagagga

SEQ ID NO: 177731 - DNA, 15 bp, Homo sapiens
atgaagttagaggat

SEQ ID NO: 177732 - DNA, 15 bp, Homo sapiens
tgaagttagaggata

SEQ ID NO: 177733 - DNA, 15 bp, Homo sapiens
gaagttagaggataa

SEQ ID NO: 177734 - DNA, 15 bp, Homo sapiens
aagttagaggataat

SEQ ID NO: 177735 - DNA, 15 bp, Homo sapiens
agttagaggataatc

SEQ ID NO: 177736 - DNA, 15 bp, Homo sapiens
gttagaggataatcc

SEQ ID NO: 177737 - DNA, 15 bp, Homo sapiens
ttagaggataatcca

SEQ ID NO: 177738 - DNA, 15 bp, Homo sapiens
tagaggataatccat

SEQ ID NO: 177739 - DNA, 15 bp, Homo sapiens
agaggataatccatg

SEQ ID NO: 177740 - DNA, 15 bp, Homo sapiens
gaggataatccatgt

SEQ ID NO: 177741 - DNA, 15 bp, Homo sapiens
aggataatccatgta

SEQ ID NO: 177742 - DNA, 15 bp, Homo sapiens
ggataatccatgtat

SEQ ID NO: 177743 - DNA, 15 bp, Homo sapiens
gataatccatgtata

SEQ ID NO: 177744 - DNA, 15 bp, Homo sapiens
ataatccatgtatac

SEQ ID NO: 177745 - DNA, 15 bp, Homo sapiens
taatccatgtataca

SEQ ID NO: 177746 - DNA, 15 bp, Homo sapiens
aatccatgtatacat

SEQ ID NO: 177747 - DNA, 15 bp, Homo sapiens
atccatgtatacata

SEQ ID NO: 177748 - DNA, 15 bp, Homo sapiens
tccatgtatacatac

SEQ ID NO: 177749 - DNA, 15 bp, Homo sapiens
ccatgtatacataca

SEQ ID NO: 177750 - DNA, 15 bp, Homo sapiens
catgtatacatacat

SEQ ID NO: 177751 - DNA, 15 bp, Homo sapiens
atgtatacatacata

SEQ ID NO: 177752 - DNA, 15 bp, Homo sapiens
tgtatacatacatat

SEQ ID NO: 177753 - DNA, 15 bp, Homo sapiens
gtatacatacatatg

SEQ ID NO: 177754 - DNA, 15 bp, Homo sapiens
tatacatacatatgc

SEQ ID NO: 177755 - DNA, 15 bp, Homo sapiens
atacatacatatgca

SEQ ID NO: 177756 - DNA, 15 bp, Homo sapiens
tacatacatatgcag

SEQ ID NO: 177757 - DNA, 15 bp, Homo sapiens
acatacatatgcagt

SEQ ID NO: 177758 - DNA, 15 bp, Homo sapiens
catacatatgcagtc

SEQ ID NO: 177759 - DNA, 15 bp, Homo sapiens
atacatatgcagtca

SEQ ID NO: 177760 - DNA, 15 bp, Homo sapiens
tacatatgcagtcac

SEQ ID NO: 177761 - DNA, 15 bp, Homo sapiens
acatatgcagtcaca

SEQ ID NO: 177762 - DNA, 15 bp, Homo sapiens
catatgcagtcacat

SEQ ID NO: 177763 - DNA, 15 bp, Homo sapiens
atatgcagtcacatt

SEQ ID NO: 177764 - DNA, 15 bp, Homo sapiens
tatgcagtcacattt

SEQ ID NO: 177765 - DNA, 15 bp, Homo sapiens
atgcagtcacattta

SEQ ID NO: 177766 - DNA, 15 bp, Homo sapiens
tgcagtcacatttat

SEQ ID NO: 177767 - DNA, 15 bp, Homo sapiens
gcagtcacatttatt

SEQ ID NO: 177768 - DNA, 15 bp, Homo sapiens
cagtcacatttattg

SEQ ID NO: 177769 - DNA, 15 bp, Homo sapiens
agtcacatttattga

SEQ ID NO: 177770 - DNA, 15 bp, Homo sapiens
gtcacatttattgat

SEQ ID NO: 177771 - DNA, 15 bp, Homo sapiens
tcacatttattgatt

SEQ ID NO: 177772 - DNA, 15 bp, Homo sapiens
cacatttattgattc

SEQ ID NO: 177773 - DNA, 15 bp, Homo sapiens
acatttattgattct

SEQ ID NO: 177774 - DNA, 15 bp, Homo sapiens
catttattgattctc

SEQ ID NO: 177775 - DNA, 15 bp, Homo sapiens
atttattgattctct

SEQ ID NO: 177776 - DNA, 15 bp, Homo sapiens
tttattgattctctg

SEQ ID NO: 177777 - DNA, 15 bp, Homo sapiens
ttattgattctctgc

SEQ ID NO: 177778 - DNA, 15 bp, Homo sapiens
tattgattctctgca

SEQ ID NO: 177779 - DNA, 15 bp, Homo sapiens
attgattctctgcat

SEQ ID NO: 177780 - DNA, 15 bp, Homo sapiens
ttgattctctgcatt

SEQ ID NO: 177781 - DNA, 15 bp, Homo sapiens
tgattctctgcatta

SEQ ID NO: 177782 - DNA, 15 bp, Homo sapiens
gattctctgcattat

SEQ ID NO: 177783 - DNA, 15 bp, Homo sapiens
attctctgcattatt

SEQ ID NO: 177784 - DNA, 15 bp, Homo sapiens
ttctctgcattattt

SEQ ID NO: 177785 - DNA, 15 bp, Homo sapiens
tctctgcattatttt

SEQ ID NO: 177786 - DNA, 15 bp, Homo sapiens
ctctgcattattttt

SEQ ID NO: 177787 - DNA, 15 bp, Homo sapiens
tctgcattatttttc

SEQ ID NO: 177788 - DNA, 15 bp, Homo sapiens
ctgcattatttttct

SEQ ID NO: 177789 - DNA, 15 bp, Homo sapiens
tgcattatttttctt

SEQ ID NO: 177790 - DNA, 15 bp, Homo sapiens
gcattatttttcttt

SEQ ID NO: 177791 - DNA, 15 bp, Homo sapiens
cattatttttctttg

SEQ ID NO: 177792 - DNA, 15 bp, Homo sapiens
attatttttctttgc

SEQ ID NO: 177793 - DNA, 15 bp, Homo sapiens
ttatttttctttgct

SEQ ID NO: 177794 - DNA, 15 bp, Homo sapiens
tatttttctttgctt

SEQ ID NO: 177795 - DNA, 15 bp, Homo sapiens
atttttctttgcttt

SEQ ID NO: 177796 - DNA, 15 bp, Homo sapiens
tttttctttgctttt

SEQ ID NO: 177797 - DNA, 15 bp, Homo sapiens
ttttctttgctttta

SEQ ID NO: 177798 - DNA, 15 bp, Homo sapiens
tttctttgcttttat

SEQ ID NO: 177799 - DNA, 15 bp, Homo sapiens
ttctttgcttttatg

SEQ ID NO: 177800 - DNA, 15 bp, Homo sapiens
tctttgcttttatgt

SEQ ID NO: 177801 - DNA, 15 bp, Homo sapiens
ctttgcttttatgtt

SEQ ID NO: 177802 - DNA, 15 bp, Homo sapiens
tttgcttttatgttt

SEQ ID NO: 177803 - DNA, 15 bp, Homo sapiens
ttgcttttatgttta

SEQ ID NO: 177804 - DNA, 15 bp, Homo sapiens
tgcttttatgtttag

SEQ ID NO: 177805 - DNA, 15 bp, Homo sapiens
gcttttatgtttaga

SEQ ID NO: 177806 - DNA, 15 bp, Homo sapiens
cttttatgtttagaa

SEQ ID NO: 177807 - DNA, 15 bp, Homo sapiens
ttttatgtttagaaa

SEQ ID NO: 177808 - DNA, 15 bp, Homo sapiens
tttatgtttagaaag

SEQ ID NO: 177809 - DNA, 15 bp, Homo sapiens
ttatgtttagaaagt

SEQ ID NO: 177810 - DNA, 15 bp, Homo sapiens
tatgtttagaaagtc

SEQ ID NO: 177811 - DNA, 15 bp, Homo sapiens
atgtttagaaagtct

SEQ ID NO: 177812 - DNA, 15 bp, Homo sapiens
tgtttagaaagtctt

SEQ ID NO: 177813 - DNA, 15 bp, Homo sapiens
gtttagaaagtcttt

SEQ ID NO: 177814 - DNA, 15 bp, Homo sapiens
tttagaaagtctttg

SEQ ID NO: 177815 - DNA, 15 bp, Homo sapiens
ttagaaagtctttgt

SEQ ID NO: 177816 - DNA, 15 bp, Homo sapiens
tagaaagtctttgtc

SEQ ID NO: 177817 - DNA, 15 bp, Homo sapiens
agaaagtctttgtcc

SEQ ID NO: 177818 - DNA, 15 bp, Homo sapiens
gaaagtctttgtcca

SEQ ID NO: 177819 - DNA, 15 bp, Homo sapiens
aaagtctttgtccat

SEQ ID NO: 177820 - DNA, 15 bp, Homo sapiens
aagtctttgtccatg

SEQ ID NO: 177821 - DNA, 15 bp, Homo sapiens
agtctttgtccatgt

SEQ ID NO: 177822 - DNA, 15 bp, Homo sapiens
gtctttgtccatgtt

SEQ ID NO: 177823 - DNA, 15 bp, Homo sapiens
tctttgtccatgttt

SEQ ID NO: 177824 - DNA, 15 bp, Homo sapiens
ctttgtccatgttta

SEQ ID NO: 177825 - DNA, 15 bp, Homo sapiens
tttgtccatgtttaa

SEQ ID NO: 177826 - DNA, 15 bp, Homo sapiens
ttgtccatgtttaag

SEQ ID NO: 177827 - DNA, 15 bp, Homo sapiens
tgtccatgtttaagg

SEQ ID NO: 177828 - DNA, 15 bp, Homo sapiens
gtccatgtttaaggg

SEQ ID NO: 177829 - DNA, 15 bp, Homo sapiens
tccatgtttaagggt

SEQ ID NO: 177830 - DNA, 15 bp, Homo sapiens
ccatgtttaagggtc

SEQ ID NO: 177831 - DNA, 15 bp, Homo sapiens
catgtttaagggtca

SEQ ID NO: 177832 - DNA, 15 bp, Homo sapiens
atgtttaagggtcag

SEQ ID NO: 177833 - DNA, 15 bp, Homo sapiens
tgtttaagggtcagt

SEQ ID NO: 177834 - DNA, 15 bp, Homo sapiens
gtttaagggtcagtt

SEQ ID NO: 177835 - DNA, 15 bp, Homo sapiens
tttaagggtcagttg

SEQ ID NO: 177836 - DNA, 15 bp, Homo sapiens
ttaagggtcagttgt

SEQ ID NO: 177837 - DNA, 15 bp, Homo sapiens
taagggtcagttgtt

SEQ ID NO: 177838 - DNA, 15 bp, Homo sapiens
aagggtcagttgtta

SEQ ID NO: 177839 - DNA, 15 bp, Homo sapiens
agggtcagttgttaa

SEQ ID NO: 177840 - DNA, 15 bp, Homo sapiens
gggtcagttgttaaa

SEQ ID NO: 177841 - DNA, 15 bp, Homo sapiens
ggtcagttgttaaaa

SEQ ID NO: 177842 - DNA, 15 bp, Homo sapiens
gtcagttgttaaaat

SEQ ID NO: 177843 - DNA, 15 bp, Homo sapiens
tcagttgttaaaatt

SEQ ID NO: 177844 - DNA, 15 bp, Homo sapiens
cagttgttaaaatta

SEQ ID NO: 177845 - DNA, 15 bp, Homo sapiens
agttgttaaaattaa

SEQ ID NO: 177846 - DNA, 15 bp, Homo sapiens
gttgttaaaattaat

SEQ ID NO: 177847 - DNA, 15 bp, Homo sapiens
ttgttaaaattaatc

SEQ ID NO: 177848 - DNA, 15 bp, Homo sapiens
tgttaaaattaatca

SEQ ID NO: 177849 - DNA, 15 bp, Homo sapiens
gttaaaattaatcat

SEQ ID NO: 177850 - DNA, 15 bp, Homo sapiens
ttaaaattaatcata

SEQ ID NO: 177851 - DNA, 15 bp, Homo sapiens
taaaattaatcataa

SEQ ID NO: 177852 - DNA, 15 bp, Homo sapiens
aaaattaatcataaa

SEQ ID NO: 177853 - DNA, 15 bp, Homo sapiens
aaattaatcataaag

SEQ ID NO: 177854 - DNA, 15 bp, Homo sapiens
aattaatcataaaga

SEQ ID NO: 177855 - DNA, 15 bp, Homo sapiens
attaatcataaagaa

SEQ ID NO: 177856 - DNA, 15 bp, Homo sapiens
ttaatcataaagaaa

SEQ ID NO: 177857 - DNA, 15 bp, Homo sapiens
taatcataaagaaaa

SEQ ID NO: 177858 - DNA, 15 bp, Homo sapiens
aatcataaagaaaat

SEQ ID NO: 177859 - DNA, 15 bp, Homo sapiens
atcataaagaaaata

SEQ ID NO: 177860 - DNA, 15 bp, Homo sapiens
tcataaagaaaataa

SEQ ID NO: 177861 - DNA, 15 bp, Homo sapiens
cataaagaaaataaa

SEQ ID NO: 177862 - DNA, 15 bp, Homo sapiens
ataaagaaaataaag

SEQ ID NO: 177863 - DNA, 15 bp, Homo sapiens
taaagaaaataaaga

SEQ ID NO: 177864 - DNA, 15 bp, Homo sapiens
aaagaaaataaagaa

SEQ ID NO: 177865 - DNA, 15 bp, Homo sapiens
aagaaaataaagaaa

SEQ ID NO: 177866 - DNA, 15 bp, Homo sapiens
agaaaataaagaaaa

SEQ ID NO: 177867 - DNA, 15 bp, Homo sapiens
gaaaataaagaaaaa

SEQ ID NO: 177868 - DNA, 15 bp, Homo sapiens
aaaataaagaaaaag

SEQ ID NO: 177869 - DNA, 15 bp, Homo sapiens
aaataaagaaaaagg

SEQ ID NO: 177870 - DNA, 15 bp, Homo sapiens
aataaagaaaaagga

SEQ ID NO: 177871 - DNA, 15 bp, Homo sapiens
ataaagaaaaaggac

SEQ ID NO: 177872 - DNA, 15 bp, Homo sapiens
taaagaaaaaggact

SEQ ID NO: 177873 - DNA, 15 bp, Homo sapiens
aaagaaaaaggactg

SEQ ID NO: 177874 - DNA, 15 bp, Homo sapiens
aagaaaaaggactgg

SEQ ID NO: 177875 - DNA, 15 bp, Homo sapiens
agaaaaaggactgga

SEQ ID NO: 177876 - DNA, 15 bp, Homo sapiens
gaaaaaggactggaa

SEQ ID NO: 177877 - DNA, 15 bp, Homo sapiens
aaaaaggactggaag

SEQ ID NO: 177878 - DNA, 15 bp, Homo sapiens
aaaaggactggaagc

SEQ ID NO: 177879 - DNA, 15 bp, Homo sapiens
aaaggactggaagct

SEQ ID NO: 177880 - DNA, 15 bp, Homo sapiens
aaggactggaagcta

SEQ ID NO: 177881 - DNA, 15 bp, Homo sapiens
aggactggaagctat

SEQ ID NO: 177882 - DNA, 15 bp, Homo sapiens
ggactggaagctata

SEQ ID NO: 177883 - DNA, 15 bp, Homo sapiens
gactggaagctatat

SEQ ID NO: 177884 - DNA, 15 bp, Homo sapiens
actggaagctatata

SEQ ID NO: 177885 - DNA, 15 bp, Homo sapiens
ctggaagctatatat

SEQ ID NO: 177886 - DNA, 15 bp, Homo sapiens
tggaagctatatata

SEQ ID NO: 177887 - DNA, 15 bp, Homo sapiens
ggaagctatatataa

SEQ ID NO: 177888 - DNA, 15 bp, Homo sapiens
gaagctatatataaa

SEQ ID NO: 177889 - DNA, 15 bp, Homo sapiens
aagctatatataaac

SEQ ID NO: 177890 - DNA, 15 bp, Homo sapiens
agctatatataaact

SEQ ID NO: 177891 - DNA, 15 bp, Homo sapiens
gctatatataaacta

SEQ ID NO: 177892 - DNA, 15 bp, Homo sapiens
ctatatataaactac

SEQ ID NO: 177893 - DNA, 15 bp, Homo sapiens
tatatataaactaca

SEQ ID NO: 177894 - DNA, 15 bp, Homo sapiens
atatataaactacac

SEQ ID NO: 177895 - DNA, 15 bp, Homo sapiens
tatataaactacact

SEQ ID NO: 177896 - DNA, 15 bp, Homo sapiens
atataaactacactc

SEQ ID NO: 177897 - DNA, 15 bp, Homo sapiens
tataaactacactct

SEQ ID NO: 177898 - DNA, 15 bp, Homo sapiens
ataaactacactctg

SEQ ID NO: 177899 - DNA, 15 bp, Homo sapiens
taaactacactctga

SEQ ID NO: 177900 - DNA, 15 bp, Homo sapiens
aaactacactctgaa

SEQ ID NO: 177901 - DNA, 15 bp, Homo sapiens
aactacactctgaaa

SEQ ID NO: 177902 - DNA, 15 bp, Homo sapiens
actacactctgaaat

SEQ ID NO: 177903 - DNA, 15 bp, Homo sapiens
ctacactctgaaata

SEQ ID NO: 177904 - DNA, 15 bp, Homo sapiens
tacactctgaaatat

SEQ ID NO: 177905 - DNA, 15 bp, Homo sapiens
acactctgaaatatt

SEQ ID NO: 177906 - DNA, 15 bp, Homo sapiens
cactctgaaatattt

SEQ ID NO: 177907 - DNA, 15 bp, Homo sapiens
actctgaaatatttt

SEQ ID NO: 177908 - DNA, 15 bp, Homo sapiens
ctctgaaatattttt

SEQ ID NO: 177909 - DNA, 15 bp, Homo sapiens
tctgaaatattttta

SEQ ID NO: 177910 - DNA, 15 bp, Homo sapiens
ctgaaatatttttaa

SEQ ID NO: 177911 - DNA, 15 bp, Homo sapiens
tgaaatatttttaat

SEQ ID NO: 177912 - DNA, 15 bp, Homo sapiens
gaaatatttttaatc

SEQ ID NO: 177913 - DNA, 15 bp, Homo sapiens
aaatatttttaatct

SEQ ID NO: 177914 - DNA, 15 bp, Homo sapiens
aatatttttaatcta

SEQ ID NO: 177915 - DNA, 15 bp, Homo sapiens
atatttttaatctat

SEQ ID NO: 177916 - DNA, 15 bp, Homo sapiens
tatttttaatctata

SEQ ID NO: 177917 - DNA, 15 bp, Homo sapiens
atttttaatctataa

SEQ ID NO: 177918 - DNA, 15 bp, Homo sapiens
tttttaatctataaa

SEQ ID NO: 177919 - DNA, 15 bp, Homo sapiens
ttttaatctataaaa

SEQ ID NO: 177920 - DNA, 15 bp, Homo sapiens
tttaatctataaaat

SEQ ID NO: 177921 - DNA, 15 bp, Homo sapiens
ttaatctataaaatt

SEQ ID NO: 177922 - DNA, 15 bp, Homo sapiens
taatctataaaattt

SEQ ID NO: 177923 - DNA, 15 bp, Homo sapiens
aatctataaaatttg

SEQ ID NO: 177924 - DNA, 15 bp, Homo sapiens
atctataaaatttgt

SEQ ID NO: 177925 - DNA, 15 bp, Homo sapiens
tctataaaatttgtc

SEQ ID NO: 177926 - DNA, 15 bp, Homo sapiens
ctataaaatttgtca

SEQ ID NO: 177927 - DNA, 15 bp, Homo sapiens
tataaaatttgtcag

SEQ ID NO: 177928 - DNA, 15 bp, Homo sapiens
ataaaatttgtcagg

SEQ ID NO: 177929 - DNA, 15 bp, Homo sapiens
taaaatttgtcagga

SEQ ID NO: 177930 - DNA, 15 bp, Homo sapiens
aaaatttgtcaggaa

SEQ ID NO: 177931 - DNA, 15 bp, Homo sapiens
aaatttgtcaggaaa

SEQ ID NO: 177932 - DNA, 15 bp, Homo sapiens
aatttgtcaggaaaa

SEQ ID NO: 177933 - DNA, 15 bp, Homo sapiens
atttgtcaggaaaac

SEQ ID NO: 177934 - DNA, 15 bp, Homo sapiens
tttgtcaggaaaaca

SEQ ID NO: 177935 - DNA, 15 bp, Homo sapiens
ttgtcaggaaaacag

SEQ ID NO: 177936 - DNA, 15 bp, Homo sapiens
tgtcaggaaaacaga

SEQ ID NO: 177937 - DNA, 15 bp, Homo sapiens
gtcaggaaaacagat

SEQ ID NO: 177938 - DNA, 15 bp, Homo sapiens
tcaggaaaacagata

SEQ ID NO: 177939 - DNA, 15 bp, Homo sapiens
caggaaaacagatac

SEQ ID NO: 177940 - DNA, 15 bp, Homo sapiens
aggaaaacagatact

SEQ ID NO: 177941 - DNA, 15 bp, Homo sapiens
ggaaaacagatactg

SEQ ID NO: 177942 - DNA, 15 bp, Homo sapiens
gaaaacagatactga

SEQ ID NO: 177943 - DNA, 15 bp, Homo sapiens
aaaacagatactgag

SEQ ID NO: 177944 - DNA, 15 bp, Homo sapiens
aaacagatactgaga

SEQ ID NO: 177945 - DNA, 15 bp, Homo sapiens
aacagatactgagaa

SEQ ID NO: 177946 - DNA, 15 bp, Homo sapiens
acagatactgagaat

SEQ ID NO: 177947 - DNA, 15 bp, Homo sapiens
cagatactgagaatg

SEQ ID NO: 177948 - DNA, 15 bp, Homo sapiens
agatactgagaatgt

SEQ ID NO: 177949 - DNA, 15 bp, Homo sapiens
gatactgagaatgta

SEQ ID NO: 177950 - DNA, 15 bp, Homo sapiens
atactgagaatgtat

SEQ ID NO: 177951 - DNA, 15 bp, Homo sapiens
tactgagaatgtata

SEQ ID NO: 177952 - DNA, 15 bp, Homo sapiens
actgagaatgtataa

SEQ ID NO: 177953 - DNA, 15 bp, Homo sapiens
ctgagaatgtataat

SEQ ID NO: 177954 - DNA, 15 bp, Homo sapiens
tgagaatgtataatg

SEQ ID NO: 177955 - DNA, 15 bp, Homo sapiens
gagaatgtataatga

SEQ ID NO: 177956 - DNA, 15 bp, Homo sapiens
agaatgtataatgaa

SEQ ID NO: 177957 - DNA, 15 bp, Homo sapiens
gaatgtataatgaag

SEQ ID NO: 177958 - DNA, 15 bp, Homo sapiens
aatgtataatgaagc

SEQ ID NO: 177959 - DNA, 15 bp, Homo sapiens
atgtataatgaagca

SEQ ID NO: 177960 - DNA, 15 bp, Homo sapiens
tgtataatgaagcag

SEQ ID NO: 177961 - DNA, 15 bp, Homo sapiens
gtataatgaagcaga

SEQ ID NO: 177962 - DNA, 15 bp, Homo sapiens
tataatgaagcagaa

SEQ ID NO: 177963 - DNA, 15 bp, Homo sapiens
ataatgaagcagaat

SEQ ID NO: 177964 - DNA, 15 bp, Homo sapiens
taatgaagcagaatt

SEQ ID NO: 177965 - DNA, 15 bp, Homo sapiens
aatgaagcagaattt

SEQ ID NO: 177966 - DNA, 15 bp, Homo sapiens
atgaagcagaatttt

SEQ ID NO: 177967 - DNA, 15 bp, Homo sapiens
tgaagcagaattttc

SEQ ID NO: 177968 - DNA, 15 bp, Homo sapiens
gaagcagaattttca

SEQ ID NO: 177969 - DNA, 15 bp, Homo sapiens
aagcagaattttcaa

SEQ ID NO: 177970 - DNA, 15 bp, Homo sapiens
agcagaattttcaag

SEQ ID NO: 177971 - DNA, 15 bp, Homo sapiens
gcagaattttcaagc

SEQ ID NO: 177972 - DNA, 15 bp, Homo sapiens
cagaattttcaagct

SEQ ID NO: 177973 - DNA, 15 bp, Homo sapiens
agaattttcaagctg

SEQ ID NO: 177974 - DNA, 15 bp, Homo sapiens
gaattttcaagctgc

SEQ ID NO: 177975 - DNA, 15 bp, Homo sapiens
aattttcaagctgcc

SEQ ID NO: 177976 - DNA, 15 bp, Homo sapiens
attttcaagctgcct

SEQ ID NO: 177977 - DNA, 15 bp, Homo sapiens
ttttcaagctgcctg

SEQ ID NO: 177978 - DNA, 15 bp, Homo sapiens
tttcaagctgcctgt

SEQ ID NO: 177979 - DNA, 15 bp, Homo sapiens
ttcaagctgcctgtc

SEQ ID NO: 177980 - DNA, 15 bp, Homo sapiens
tcaagctgcctgtct

SEQ ID NO: 177981 - DNA, 15 bp, Homo sapiens
caagctgcctgtcta

SEQ ID NO: 177982 - DNA, 15 bp, Homo sapiens
aagctgcctgtctac

SEQ ID NO: 177983 - DNA, 15 bp, Homo sapiens
agctgcctgtctaca

SEQ ID NO: 177984 - DNA, 15 bp, Homo sapiens
gctgcctgtctacac

SEQ ID NO: 177985 - DNA, 15 bp, Homo sapiens
ctgcctgtctacact

SEQ ID NO: 177986 - DNA, 15 bp, Homo sapiens
tgcctgtctacactt

SEQ ID NO: 177987 - DNA, 15 bp, Homo sapiens
gcctgtctacacttt

SEQ ID NO: 177988 - DNA, 15 bp, Homo sapiens
cctgtctacactttt

SEQ ID NO: 177989 - DNA, 15 bp, Homo sapiens
ctgtctacacttttt

SEQ ID NO: 177990 - DNA, 15 bp, Homo sapiens
tgtctacacttttta

SEQ ID NO: 177991 - DNA, 15 bp, Homo sapiens
gtctacactttttaa

SEQ ID NO: 177992 - DNA, 15 bp, Homo sapiens
tctacactttttaaa

SEQ ID NO: 177993 - DNA, 15 bp, Homo sapiens
ctacactttttaaaa

SEQ ID NO: 177994 - DNA, 15 bp, Homo sapiens
tacactttttaaaaa

SEQ ID NO: 177995 - DNA, 15 bp, Homo sapiens
acactttttaaaaaa

SEQ ID NO: 177996 - DNA, 15 bp, Homo sapiens
cactttttaaaaaag

SEQ ID NO: 177997 - DNA, 15 bp, Homo sapiens
actttttaaaaaaga

SEQ ID NO: 177998 - DNA, 15 bp, Homo sapiens
ctttttaaaaaagaa

SEQ ID NO: 177999 - DNA, 15 bp, Homo sapiens
tttttaaaaaagaaa

SEQ ID NO: 178000 - DNA, 15 bp, Homo sapiens
ttttaaaaaagaaat

SEQ ID NO: 178001 - DNA, 15 bp, Homo sapiens
tttaaaaaagaaatg

SEQ ID NO: 178002 - DNA, 15 bp, Homo sapiens
ttaaaaaagaaatgc

SEQ ID NO: 178003 - DNA, 15 bp, Homo sapiens
taaaaaagaaatgca

SEQ ID NO: 178004 - DNA, 15 bp, Homo sapiens
aaaaaagaaatgcat

SEQ ID NO: 178005 - DNA, 15 bp, Homo sapiens
aaaaagaaatgcata

SEQ ID NO: 178006 - DNA, 15 bp, Homo sapiens
aaaagaaatgcataa

SEQ ID NO: 178007 - DNA, 15 bp, Homo sapiens
aaagaaatgcataag

SEQ ID NO: 178008 - DNA, 15 bp, Homo sapiens
aagaaatgcataaga

SEQ ID NO: 178009 - DNA, 15 bp, Homo sapiens
agaaatgcataagag

SEQ ID NO: 178010 - DNA, 15 bp, Homo sapiens
gaaatgcataagaga

SEQ ID NO: 178011 - DNA, 15 bp, Homo sapiens
aaatgcataagagaa

SEQ ID NO: 178012 - DNA, 15 bp, Homo sapiens
aatgcataagagaag

SEQ ID NO: 178013 - DNA, 15 bp, Homo sapiens
atgcataagagaagt

SEQ ID NO: 178014 - DNA, 15 bp, Homo sapiens
tgcataagagaagta

SEQ ID NO: 178015 - DNA, 15 bp, Homo sapiens
gcataagagaagtac

SEQ ID NO: 178016 - DNA, 15 bp, Homo sapiens
cataagagaagtact

SEQ ID NO: 178017 - DNA, 15 bp, Homo sapiens
ataagagaagtactt

SEQ ID NO: 178018 - DNA, 15 bp, Homo sapiens
taagagaagtacttt

SEQ ID NO: 178019 - DNA, 15 bp, Homo sapiens
aagagaagtactttc

SEQ ID NO: 178020 - DNA, 15 bp, Homo sapiens
agagaagtactttct

SEQ ID NO: 178021 - DNA, 15 bp, Homo sapiens
gagaagtactttctg

SEQ ID NO: 178022 - DNA, 15 bp, Homo sapiens
agaagtactttctga

SEQ ID NO: 178023 - DNA, 15 bp, Homo sapiens
gaagtactttctgat

SEQ ID NO: 178024 - DNA, 15 bp, Homo sapiens
aagtactttctgata

SEQ ID NO: 178025 - DNA, 15 bp, Homo sapiens
agtactttctgatat

SEQ ID NO: 178026 - DNA, 15 bp, Homo sapiens
gtactttctgatatc

SEQ ID NO: 178027 - DNA, 15 bp, Homo sapiens
tactttctgatatcc

SEQ ID NO: 178028 - DNA, 15 bp, Homo sapiens
actttctgatatcct

SEQ ID NO: 178029 - DNA, 15 bp, Homo sapiens
ctttctgatatccta

SEQ ID NO: 178030 - DNA, 15 bp, Homo sapiens
tttctgatatcctac

SEQ ID NO: 178031 - DNA, 15 bp, Homo sapiens
ttctgatatcctaca

SEQ ID NO: 178032 - DNA, 15 bp, Homo sapiens
tctgatatcctacat

SEQ ID NO: 178033 - DNA, 15 bp, Homo sapiens
ctgatatcctacatt

SEQ ID NO: 178034 - DNA, 15 bp, Homo sapiens
tgatatcctacattt

SEQ ID NO: 178035 - DNA, 15 bp, Homo sapiens
gatatcctacatttc

SEQ ID NO: 178036 - DNA, 15 bp, Homo sapiens
atatcctacatttcc

SEQ ID NO: 178037 - DNA, 15 bp, Homo sapiens
tatcctacatttcct

SEQ ID NO: 178038 - DNA, 15 bp, Homo sapiens
atcctacatttcctt

SEQ ID NO: 178039 - DNA, 15 bp, Homo sapiens
tcctacatttccttc

SEQ ID NO: 178040 - DNA, 15 bp, Homo sapiens
cctacatttccttct

SEQ ID NO: 178041 - DNA, 15 bp, Homo sapiens
ctacatttccttctc

SEQ ID NO: 178042 - DNA, 15 bp, Homo sapiens
tacatttccttctcc

SEQ ID NO: 178043 - DNA, 15 bp, Homo sapiens
acatttccttctcct

SEQ ID NO: 178044 - DNA, 15 bp, Homo sapiens
catttccttctcctt

SEQ ID NO: 178045 - DNA, 15 bp, Homo sapiens
atttccttctccttt

SEQ ID NO: 178046 - DNA, 15 bp, Homo sapiens
tttccttctcctttt

SEQ ID NO: 178047 - DNA, 15 bp, Homo sapiens
ttccttctccttttc

SEQ ID NO: 178048 - DNA, 15 bp, Homo sapiens
tccttctccttttca

SEQ ID NO: 178049 - DNA, 15 bp, Homo sapiens
ccttctccttttcaa

SEQ ID NO: 178050 - DNA, 15 bp, Homo sapiens
cttctccttttcaat

SEQ ID NO: 178051 - DNA, 15 bp, Homo sapiens
ttctccttttcaatt

SEQ ID NO: 178052 - DNA, 15 bp, Homo sapiens
tctccttttcaattt

SEQ ID NO: 178053 - DNA, 15 bp, Homo sapiens
ctccttttcaatttt

SEQ ID NO: 178054 - DNA, 15 bp, Homo sapiens
tccttttcaattttg

SEQ ID NO: 178055 - DNA, 15 bp, Homo sapiens
ccttttcaattttga

SEQ ID NO: 178056 - DNA, 15 bp, Homo sapiens
cttttcaattttgag

SEQ ID NO: 178057 - DNA, 15 bp, Homo sapiens
ttttcaattttgaga

SEQ ID NO: 178058 - DNA, 15 bp, Homo sapiens
tttcaattttgagag

SEQ ID NO: 178059 - DNA, 15 bp, Homo sapiens
ttcaattttgagagg

SEQ ID NO: 178060 - DNA, 15 bp, Homo sapiens
tcaattttgagagga

SEQ ID NO: 178061 - DNA, 15 bp, Homo sapiens
caattttgagaggaa

SEQ ID NO: 178062 - DNA, 15 bp, Homo sapiens
aattttgagaggaaa

SEQ ID NO: 178063 - DNA, 15 bp, Homo sapiens
attttgagaggaaat

SEQ ID NO: 178064 - DNA, 15 bp, Homo sapiens
ttttgagaggaaata

SEQ ID NO: 178065 - DNA, 15 bp, Homo sapiens
tttgagaggaaataa

SEQ ID NO: 178066 - DNA, 15 bp, Homo sapiens
ttgagaggaaataac

SEQ ID NO: 178067 - DNA, 15 bp, Homo sapiens
tgagaggaaataact

SEQ ID NO: 178068 - DNA, 15 bp, Homo sapiens
gagaggaaataactt

SEQ ID NO: 178069 - DNA, 15 bp, Homo sapiens
agaggaaataacttt

SEQ ID NO: 178070 - DNA, 15 bp, Homo sapiens
gaggaaataactttt

SEQ ID NO: 178071 - DNA, 15 bp, Homo sapiens
aggaaataacttttt

SEQ ID NO: 178072 - DNA, 15 bp, Homo sapiens
ggaaataactttttc

SEQ ID NO: 178073 - DNA, 15 bp, Homo sapiens
gaaataactttttcc

SEQ ID NO: 178074 - DNA, 15 bp, Homo sapiens
aaataactttttcct

SEQ ID NO: 178075 - DNA, 15 bp, Homo sapiens
aataactttttcctt

SEQ ID NO: 178076 - DNA, 15 bp, Homo sapiens
ataactttttccttt

SEQ ID NO: 178077 - DNA, 15 bp, Homo sapiens
taactttttcctttg

SEQ ID NO: 178078 - DNA, 15 bp, Homo sapiens
aactttttcctttgt

SEQ ID NO: 178079 - DNA, 15 bp, Homo sapiens
actttttcctttgta

SEQ ID NO: 178080 - DNA, 15 bp, Homo sapiens
ctttttcctttgtat

SEQ ID NO: 178081 - DNA, 15 bp, Homo sapiens
tttttcctttgtata

SEQ ID NO: 178082 - DNA, 15 bp, Homo sapiens
ttttcctttgtataa

SEQ ID NO: 178083 - DNA, 15 bp, Homo sapiens
tttcctttgtataat

SEQ ID NO: 178084 - DNA, 15 bp, Homo sapiens
ttcctttgtataatt

SEQ ID NO: 178085 - DNA, 15 bp, Homo sapiens
tcctttgtataattt

SEQ ID NO: 178086 - DNA, 15 bp, Homo sapiens
cctttgtataatttt

SEQ ID NO: 178087 - DNA, 15 bp, Homo sapiens
ctttgtataattttc

SEQ ID NO: 178088 - DNA, 15 bp, Homo sapiens
tttgtataattttct

SEQ ID NO: 178089 - DNA, 15 bp, Homo sapiens
ttgtataattttctc

SEQ ID NO: 178090 - DNA, 15 bp, Homo sapiens
tgtataattttctcc

SEQ ID NO: 178091 - DNA, 15 bp, Homo sapiens
gtataattttctccg

SEQ ID NO: 178092 - DNA, 15 bp, Homo sapiens
tataattttctccgg

SEQ ID NO: 178093 - DNA, 15 bp, Homo sapiens
ataattttctccggt

SEQ ID NO: 178094 - DNA, 15 bp, Homo sapiens
taattttctccggta

SEQ ID NO: 178095 - DNA, 15 bp, Homo sapiens
aattttctccggtag

SEQ ID NO: 178096 - DNA, 15 bp, Homo sapiens
attttctccggtagg

SEQ ID NO: 178097 - DNA, 15 bp, Homo sapiens
ttttctccggtagga

SEQ ID NO: 178098 - DNA, 15 bp, Homo sapiens
tttctccggtaggat

SEQ ID NO: 178099 - DNA, 15 bp, Homo sapiens
ttctccggtaggatt

SEQ ID NO: 178100 - DNA, 15 bp, Homo sapiens
tctccggtaggattc

SEQ ID NO: 178101 - DNA, 15 bp, Homo sapiens
ctccggtaggattct

SEQ ID NO: 178102 - DNA, 15 bp, Homo sapiens
tccggtaggattcta

SEQ ID NO: 178103 - DNA, 15 bp, Homo sapiens
ccggtaggattctat

SEQ ID NO: 178104 - DNA, 15 bp, Homo sapiens
cggtaggattctatt

SEQ ID NO: 178105 - DNA, 15 bp, Homo sapiens
ggtaggattctattt

SEQ ID NO: 178106 - DNA, 15 bp, Homo sapiens
gtaggattctatttc

SEQ ID NO: 178107 - DNA, 15 bp, Homo sapiens
taggattctatttct

SEQ ID NO: 178108 - DNA, 15 bp, Homo sapiens
aggattctatttcta

SEQ ID NO: 178109 - DNA, 15 bp, Homo sapiens
ggattctatttctag

SEQ ID NO: 178110 - DNA, 15 bp, Homo sapiens
gattctatttctagt

SEQ ID NO: 178111 - DNA, 15 bp, Homo sapiens
attctatttctagtt

SEQ ID NO: 178112 - DNA, 15 bp, Homo sapiens
ttctatttctagttg

SEQ ID NO: 178113 - DNA, 15 bp, Homo sapiens
tctatttctagttga

SEQ ID NO: 178114 - DNA, 15 bp, Homo sapiens
ctatttctagttgac

SEQ ID NO: 178115 - DNA, 15 bp, Homo sapiens
tatttctagttgacc

SEQ ID NO: 178116 - DNA, 15 bp, Homo sapiens
atttctagttgaccc

SEQ ID NO: 178117 - DNA, 15 bp, Homo sapiens
tttctagttgaccca

SEQ ID NO: 178118 - DNA, 15 bp, Homo sapiens
ttctagttgacccaa

SEQ ID NO: 178119 - DNA, 15 bp, Homo sapiens
tctagttgacccaaa

SEQ ID NO: 178120 - DNA, 15 bp, Homo sapiens
ctagttgacccaaag

SEQ ID NO: 178121 - DNA, 15 bp, Homo sapiens
tagttgacccaaagt

SEQ ID NO: 178122 - DNA, 15 bp, Homo sapiens
agttgacccaaagtc

SEQ ID NO: 178123 - DNA, 15 bp, Homo sapiens
gttgacccaaagtca

SEQ ID NO: 178124 - DNA, 15 bp, Homo sapiens
ttgacccaaagtcat

SEQ ID NO: 178125 - DNA, 15 bp, Homo sapiens
tgacccaaagtcatg

SEQ ID NO: 178126 - DNA, 15 bp, Homo sapiens
gacccaaagtcatgt

SEQ ID NO: 178127 - DNA, 15 bp, Homo sapiens
acccaaagtcatgtc

SEQ ID NO: 178128 - DNA, 15 bp, Homo sapiens
cccaaagtcatgtct

SEQ ID NO: 178129 - DNA, 15 bp, Homo sapiens
ccaaagtcatgtctg

SEQ ID NO: 178130 - DNA, 15 bp, Homo sapiens
caaagtcatgtctga

SEQ ID NO: 178131 - DNA, 15 bp, Homo sapiens
aaagtcatgtctgag

SEQ ID NO: 178132 - DNA, 15 bp, Homo sapiens
aagtcatgtctgagc

SEQ ID NO: 178133 - DNA, 15 bp, Homo sapiens
agtcatgtctgagcc

SEQ ID NO: 178134 - DNA, 15 bp, Homo sapiens
gtcatgtctgagcct

SEQ ID NO: 178135 - DNA, 15 bp, Homo sapiens
tcatgtctgagcctt

SEQ ID NO: 178136 - DNA, 15 bp, Homo sapiens
catgtctgagccttt

SEQ ID NO: 178137 - DNA, 15 bp, Homo sapiens
atgtctgagccttta

SEQ ID NO: 178138 - DNA, 15 bp, Homo sapiens
tgtctgagcctttaa

SEQ ID NO: 178139 - DNA, 15 bp, Homo sapiens
gtctgagcctttaag

SEQ ID NO: 178140 - DNA, 15 bp, Homo sapiens
tctgagcctttaagg

SEQ ID NO: 178141 - DNA, 15 bp, Homo sapiens
ctgagcctttaagga

SEQ ID NO: 178142 - DNA, 15 bp, Homo sapiens
tgagcctttaaggaa

SEQ ID NO: 178143 - DNA, 15 bp, Homo sapiens
gagcctttaaggaaa

SEQ ID NO: 178144 - DNA, 15 bp, Homo sapiens
agcctttaaggaaaa

SEQ ID NO: 178145 - DNA, 15 bp, Homo sapiens
gcctttaaggaaaaa

SEQ ID NO: 178146 - DNA, 15 bp, Homo sapiens
cctttaaggaaaaaa

SEQ ID NO: 178147 - DNA, 15 bp, Homo sapiens
ctttaaggaaaaaaa

SEQ ID NO: 178148 - DNA, 15 bp, Homo sapiens
tttaaggaaaaaaag

SEQ ID NO: 178149 - DNA, 15 bp, Homo sapiens
ttaaggaaaaaaaga

SEQ ID NO: 178150 - DNA, 15 bp, Homo sapiens
taaggaaaaaaagaa

SEQ ID NO: 178151 - DNA, 15 bp, Homo sapiens
aaggaaaaaaagaaa

SEQ ID NO: 178152 - DNA, 15 bp, Homo sapiens
aggaaaaaaagaaaa

SEQ ID NO: 178153 - DNA, 15 bp, Homo sapiens
ggaaaaaaagaaaac

SEQ ID NO: 178154 - DNA, 15 bp, Homo sapiens
gaaaaaaagaaaacc

SEQ ID NO: 178155 - DNA, 15 bp, Homo sapiens
aaaaaaagaaaaccc

SEQ ID NO: 178156 - DNA, 15 bp, Homo sapiens
aaaaaagaaaaccct

SEQ ID NO: 178157 - DNA, 15 bp, Homo sapiens
aaaaagaaaaccctc

SEQ ID NO: 178158 - DNA, 15 bp, Homo sapiens
aaaagaaaaccctca

SEQ ID NO: 178159 - DNA, 15 bp, Homo sapiens
aaagaaaaccctcaa

SEQ ID NO: 178160 - DNA, 15 bp, Homo sapiens
aagaaaaccctcaag

SEQ ID NO: 178161 - DNA, 15 bp, Homo sapiens
agaaaaccctcaagg

SEQ ID NO: 178162 - DNA, 15 bp, Homo sapiens
gaaaaccctcaagga

SEQ ID NO: 178163 - DNA, 15 bp, Homo sapiens
aaaaccctcaaggag

SEQ ID NO: 178164 - DNA, 15 bp, Homo sapiens
aaaccctcaaggaga

SEQ ID NO: 178165 - DNA, 15 bp, Homo sapiens
aaccctcaaggagat

SEQ ID NO: 178166 - DNA, 15 bp, Homo sapiens
accctcaaggagatg

SEQ ID NO: 178167 - DNA, 15 bp, Homo sapiens
ccctcaaggagatgg

SEQ ID NO: 178168 - DNA, 15 bp, Homo sapiens
cctcaaggagatggt

SEQ ID NO: 178169 - DNA, 15 bp, Homo sapiens
ctcaaggagatggtt

SEQ ID NO: 178170 - DNA, 15 bp, Homo sapiens
tcaaggagatggttt

SEQ ID NO: 178171 - DNA, 15 bp, Homo sapiens
caaggagatggtttt

SEQ ID NO: 178172 - DNA, 15 bp, Homo sapiens
aaggagatggtttta

SEQ ID NO: 178173 - DNA, 15 bp, Homo sapiens
aggagatggttttat

SEQ ID NO: 178174 - DNA, 15 bp, Homo sapiens
ggagatggttttatt

SEQ ID NO: 178175 - DNA, 15 bp, Homo sapiens
gagatggttttattc

SEQ ID NO: 178176 - DNA, 15 bp, Homo sapiens
agatggttttattct

SEQ ID NO: 178177 - DNA, 15 bp, Homo sapiens
gatggttttattctt

SEQ ID NO: 178178 - DNA, 15 bp, Homo sapiens
atggttttattcttc

SEQ ID NO: 178179 - DNA, 15 bp, Homo sapiens
tggttttattcttcc

SEQ ID NO: 178180 - DNA, 15 bp, Homo sapiens
ggttttattcttcct

SEQ ID NO: 178181 - DNA, 15 bp, Homo sapiens
gttttattcttccta

SEQ ID NO: 178182 - DNA, 15 bp, Homo sapiens
ttttattcttcctaa

SEQ ID NO: 178183 - DNA, 15 bp, Homo sapiens
tttattcttcctaaa

SEQ ID NO: 178184 - DNA, 15 bp, Homo sapiens
ttattcttcctaaat

SEQ ID NO: 178185 - DNA, 15 bp, Homo sapiens
tattcttcctaaata

SEQ ID NO: 178186 - DNA, 15 bp, Homo sapiens
attcttcctaaatat

SEQ ID NO: 178187 - DNA, 15 bp, Homo sapiens
ttcttcctaaatatc

SEQ ID NO: 178188 - DNA, 15 bp, Homo sapiens
tcttcctaaatatcc

SEQ ID NO: 178189 - DNA, 15 bp, Homo sapiens
cttcctaaatatcca

SEQ ID NO: 178190 - DNA, 15 bp, Homo sapiens
ttcctaaatatccag

SEQ ID NO: 178191 - DNA, 15 bp, Homo sapiens
tcctaaatatccagg

SEQ ID NO: 178192 - DNA, 15 bp, Homo sapiens
cctaaatatccaggt

SEQ ID NO: 178193 - DNA, 15 bp, Homo sapiens
ctaaatatccaggta

SEQ ID NO: 178194 - DNA, 15 bp, Homo sapiens
taaatatccaggtaa

SEQ ID NO: 178195 - DNA, 15 bp, Homo sapiens
aaatatccaggtaaa

SEQ ID NO: 178196 - DNA, 15 bp, Homo sapiens
aatatccaggtaaat

SEQ ID NO: 178197 - DNA, 15 bp, Homo sapiens
atatccaggtaaatg

SEQ ID NO: 178198 - DNA, 15 bp, Homo sapiens
tatccaggtaaatgc

SEQ ID NO: 178199 - DNA, 15 bp, Homo sapiens
atccaggtaaatgct

SEQ ID NO: 178200 - DNA, 15 bp, Homo sapiens
tccaggtaaatgctt

SEQ ID NO: 178201 - DNA, 15 bp, Homo sapiens
ccaggtaaatgctta

SEQ ID NO: 178202 - DNA, 15 bp, Homo sapiens
caggtaaatgcttaa

SEQ ID NO: 178203 - DNA, 15 bp, Homo sapiens
aggtaaatgcttaaa

SEQ ID NO: 178204 - DNA, 15 bp, Homo sapiens
ggtaaatgcttaaaa

SEQ ID NO: 178205 - DNA, 15 bp, Homo sapiens
gtaaatgcttaaaaa

SEQ ID NO: 178206 - DNA, 15 bp, Homo sapiens
taaatgcttaaaaac

SEQ ID NO: 178207 - DNA, 15 bp, Homo sapiens
aaatgcttaaaaacc

SEQ ID NO: 178208 - DNA, 15 bp, Homo sapiens
aatgcttaaaaacca

SEQ ID NO: 178209 - DNA, 15 bp, Homo sapiens
atgcttaaaaaccat

SEQ ID NO: 178210 - DNA, 15 bp, Homo sapiens
tgcttaaaaaccatt

SEQ ID NO: 178211 - DNA, 15 bp, Homo sapiens
gcttaaaaaccattc

SEQ ID NO: 178212 - DNA, 15 bp, Homo sapiens
cttaaaaaccattct

SEQ ID NO: 178213 - DNA, 15 bp, Homo sapiens
ttaaaaaccattcta

SEQ ID NO: 178214 - DNA, 15 bp, Homo sapiens
taaaaaccattctac

SEQ ID NO: 178215 - DNA, 15 bp, Homo sapiens
aaaaaccattctacc

SEQ ID NO: 178216 - DNA, 15 bp, Homo sapiens
aaaaccattctacct

SEQ ID NO: 178217 - DNA, 15 bp, Homo sapiens
aaaccattctacctt

SEQ ID NO: 178218 - DNA, 15 bp, Homo sapiens
aaccattctaccttc

SEQ ID NO: 178219 - DNA, 15 bp, Homo sapiens
accattctaccttct

SEQ ID NO: 178220 - DNA, 15 bp, Homo sapiens
ccattctaccttctg

SEQ ID NO: 178221 - DNA, 15 bp, Homo sapiens
cattctaccttctgg

SEQ ID NO: 178222 - DNA, 15 bp, Homo sapiens
attctaccttctggc

SEQ ID NO: 178223 - DNA, 15 bp, Homo sapiens
ttctaccttctggcc

SEQ ID NO: 178224 - DNA, 15 bp, Homo sapiens
tctaccttctggcca

SEQ ID NO: 178225 - DNA, 15 bp, Homo sapiens
ctaccttctggccag

SEQ ID NO: 178226 - DNA, 15 bp, Homo sapiens
taccttctggccaga

SEQ ID NO: 178227 - DNA, 15 bp, Homo sapiens
accttctggccagaa

SEQ ID NO: 178228 - DNA, 15 bp, Homo sapiens
ccttctggccagaag

SEQ ID NO: 178229 - DNA, 15 bp, Homo sapiens
cttctggccagaagt

SEQ ID NO: 178230 - DNA, 15 bp, Homo sapiens
ttctggccagaagta

SEQ ID NO: 178231 - DNA, 15 bp, Homo sapiens
tctggccagaagtat

SEQ ID NO: 178232 - DNA, 15 bp, Homo sapiens
ctggccagaagtata

SEQ ID NO: 178233 - DNA, 15 bp, Homo sapiens
tggccagaagtataa

SEQ ID NO: 178234 - DNA, 15 bp, Homo sapiens
ggccagaagtataag

SEQ ID NO: 178235 - DNA, 15 bp, Homo sapiens
gccagaagtataaga

SEQ ID NO: 178236 - DNA, 15 bp, Homo sapiens
ccagaagtataagat

SEQ ID NO: 178237 - DNA, 15 bp, Homo sapiens
cagaagtataagatg

SEQ ID NO: 178238 - DNA, 15 bp, Homo sapiens
agaagtataagatgg

SEQ ID NO: 178239 - DNA, 15 bp, Homo sapiens
gaagtataagatggg

SEQ ID NO: 178240 - DNA, 15 bp, Homo sapiens
aagtataagatgggt

SEQ ID NO: 178241 - DNA, 15 bp, Homo sapiens
agtataagatgggtg

SEQ ID NO: 178242 - DNA, 15 bp, Homo sapiens
gtataagatgggtgg

SEQ ID NO: 178243 - DNA, 15 bp, Homo sapiens
tataagatgggtgga

SEQ ID NO: 178244 - DNA, 15 bp, Homo sapiens
ataagatgggtggag

SEQ ID NO: 178245 - DNA, 15 bp, Homo sapiens
taagatgggtggaga

SEQ ID NO: 178246 - DNA, 15 bp, Homo sapiens
aagatgggtggagag

SEQ ID NO: 178247 - DNA, 15 bp, Homo sapiens
agatgggtggagaga

SEQ ID NO: 178248 - DNA, 15 bp, Homo sapiens
gatgggtggagagaa

SEQ ID NO: 178249 - DNA, 15 bp, Homo sapiens
atgggtggagagaaa

SEQ ID NO: 178250 - DNA, 15 bp, Homo sapiens
tgggtggagagaaag

SEQ ID NO: 178251 - DNA, 15 bp, Homo sapiens
gggtggagagaaaga

SEQ ID NO: 178252 - DNA, 15 bp, Homo sapiens
ggtggagagaaagaa

SEQ ID NO: 178253 - DNA, 15 bp, Homo sapiens
gtggagagaaagaaa

SEQ ID NO: 178254 - DNA, 15 bp, Homo sapiens
tggagagaaagaaac

SEQ ID NO: 178255 - DNA, 15 bp, Homo sapiens
ggagagaaagaaact

SEQ ID NO: 178256 - DNA, 15 bp, Homo sapiens
gagagaaagaaacta

SEQ ID NO: 178257 - DNA, 15 bp, Homo sapiens
agagaaagaaactag

SEQ ID NO: 178258 - DNA, 15 bp, Homo sapiens
gagaaagaaactaga

SEQ ID NO: 178259 - DNA, 15 bp, Homo sapiens
agaaagaaactagag

SEQ ID NO: 178260 - DNA, 15 bp, Homo sapiens
gaaagaaactagagg

SEQ ID NO: 178261 - DNA, 15 bp, Homo sapiens
aaagaaactagagga

SEQ ID NO: 178262 - DNA, 15 bp, Homo sapiens
aagaaactagaggac

SEQ ID NO: 178263 - DNA, 15 bp, Homo sapiens
agaaactagaggaca

SEQ ID NO: 178264 - DNA, 15 bp, Homo sapiens
gaaactagaggacaa

SEQ ID NO: 178265 - DNA, 15 bp, Homo sapiens
aaactagaggacaag

SEQ ID NO: 178266 - DNA, 15 bp, Homo sapiens
aactagaggacaagg

SEQ ID NO: 178267 - DNA, 15 bp, Homo sapiens
actagaggacaaggt

SEQ ID NO: 178268 - DNA, 15 bp, Homo sapiens
ctagaggacaaggta

SEQ ID NO: 178269 - DNA, 15 bp, Homo sapiens
tagaggacaaggtag

SEQ ID NO: 178270 - DNA, 15 bp, Homo sapiens
agaggacaaggtaga

SEQ ID NO: 178271 - DNA, 15 bp, Homo sapiens
gaggacaaggtagat

SEQ ID NO: 178272 - DNA, 15 bp, Homo sapiens
aggacaaggtagatt

SEQ ID NO: 178273 - DNA, 15 bp, Homo sapiens
ggacaaggtagattg

SEQ ID NO: 178274 - DNA, 15 bp, Homo sapiens
gacaaggtagattgg

SEQ ID NO: 178275 - DNA, 15 bp, Homo sapiens
acaaggtagattgga

SEQ ID NO: 178276 - DNA, 15 bp, Homo sapiens
caaggtagattggac

SEQ ID NO: 178277 - DNA, 15 bp, Homo sapiens
aaggtagattggaca

SEQ ID NO: 178278 - DNA, 15 bp, Homo sapiens
aggtagattggacaa

SEQ ID NO: 178279 - DNA, 15 bp, Homo sapiens
ggtagattggacaag

SEQ ID NO: 178280 - DNA, 15 bp, Homo sapiens
gtagattggacaaga

SEQ ID NO: 178281 - DNA, 15 bp, Homo sapiens
tagattggacaagaa

SEQ ID NO: 178282 - DNA, 15 bp, Homo sapiens
agattggacaagaaa

SEQ ID NO: 178283 - DNA, 15 bp, Homo sapiens
gattggacaagaaaa

SEQ ID NO: 178284 - DNA, 15 bp, Homo sapiens
attggacaagaaaaa

SEQ ID NO: 178285 - DNA, 15 bp, Homo sapiens
ttggacaagaaaaag

SEQ ID NO: 178286 - DNA, 15 bp, Homo sapiens
tggacaagaaaaagg

SEQ ID NO: 178287 - DNA, 15 bp, Homo sapiens
ggacaagaaaaagga

SEQ ID NO: 178288 - DNA, 15 bp, Homo sapiens
gacaagaaaaaggaa

SEQ ID NO: 178289 - DNA, 15 bp, Homo sapiens
acaagaaaaaggaaa

SEQ ID NO: 178290 - DNA, 15 bp, Homo sapiens
caagaaaaaggaaag

SEQ ID NO: 178291 - DNA, 15 bp, Homo sapiens
aagaaaaaggaaaga

SEQ ID NO: 178292 - DNA, 15 bp, Homo sapiens
agaaaaaggaaagaa

SEQ ID NO: 178293 - DNA, 15 bp, Homo sapiens
gaaaaaggaaagaaa

SEQ ID NO: 178294 - DNA, 15 bp, Homo sapiens
aaaaaggaaagaaat

SEQ ID NO: 178295 - DNA, 15 bp, Homo sapiens
aaaaggaaagaaata

SEQ ID NO: 178296 - DNA, 15 bp, Homo sapiens
aaaggaaagaaatac

SEQ ID NO: 178297 - DNA, 15 bp, Homo sapiens
aaggaaagaaataca

SEQ ID NO: 178298 - DNA, 15 bp, Homo sapiens
aggaaagaaatacaa

SEQ ID NO: 178299 - DNA, 15 bp, Homo sapiens
ggaaagaaatacaaa

SEQ ID NO: 178300 - DNA, 15 bp, Homo sapiens
gaaagaaatacaaag

SEQ ID NO: 178301 - DNA, 15 bp, Homo sapiens
aaagaaatacaaagt

SEQ ID NO: 178302 - DNA, 15 bp, Homo sapiens
aagaaatacaaagtt

SEQ ID NO: 178303 - DNA, 15 bp, Homo sapiens
agaaatacaaagtta

SEQ ID NO: 178304 - DNA, 15 bp, Homo sapiens
gaaatacaaagttac

SEQ ID NO: 178305 - DNA, 15 bp, Homo sapiens
aaatacaaagttact

SEQ ID NO: 178306 - DNA, 15 bp, Homo sapiens
aatacaaagttacta

SEQ ID NO: 178307 - DNA, 15 bp, Homo sapiens
atacaaagttactaa

SEQ ID NO: 178308 - DNA, 15 bp, Homo sapiens
tacaaagttactaaa

SEQ ID NO: 178309 - DNA, 15 bp, Homo sapiens
acaaagttactaaag

SEQ ID NO: 178310 - DNA, 15 bp, Homo sapiens
caaagttactaaaga

SEQ ID NO: 178311 - DNA, 15 bp, Homo sapiens
aaagttactaaagaa

SEQ ID NO: 178312 - DNA, 15 bp, Homo sapiens
aagttactaaagaat

SEQ ID NO: 178313 - DNA, 15 bp, Homo sapiens
agttactaaagaatt

SEQ ID NO: 178314 - DNA, 15 bp, Homo sapiens
gttactaaagaatta

SEQ ID NO: 178315 - DNA, 15 bp, Homo sapiens
ttactaaagaattat

SEQ ID NO: 178316 - DNA, 15 bp, Homo sapiens
tactaaagaattatg

SEQ ID NO: 178317 - DNA, 15 bp, Homo sapiens
actaaagaattatga

SEQ ID NO: 178318 - DNA, 15 bp, Homo sapiens
ctaaagaattatgaa

SEQ ID NO: 178319 - DNA, 15 bp, Homo sapiens
taaagaattatgaac

SEQ ID NO: 178320 - DNA, 15 bp, Homo sapiens
aaagaattatgaaca

SEQ ID NO: 178321 - DNA, 15 bp, Homo sapiens
aagaattatgaacaa

SEQ ID NO: 178322 - DNA, 15 bp, Homo sapiens
agaattatgaacaac

SEQ ID NO: 178323 - DNA, 15 bp, Homo sapiens
gaattatgaacaaca

SEQ ID NO: 178324 - DNA, 15 bp, Homo sapiens
aattatgaacaacat

SEQ ID NO: 178325 - DNA, 15 bp, Homo sapiens
attatgaacaacata

SEQ ID NO: 178326 - DNA, 15 bp, Homo sapiens
ttatgaacaacatag

SEQ ID NO: 178327 - DNA, 15 bp, Homo sapiens
tatgaacaacataga

SEQ ID NO: 178328 - DNA, 15 bp, Homo sapiens
atgaacaacatagag

SEQ ID NO: 178329 - DNA, 15 bp, Homo sapiens
tgaacaacatagagg

SEQ ID NO: 178330 - DNA, 15 bp, Homo sapiens
gaacaacatagagga

SEQ ID NO: 178331 - DNA, 15 bp, Homo sapiens
aacaacatagaggaa

SEQ ID NO: 178332 - DNA, 15 bp, Homo sapiens
acaacatagaggaag

SEQ ID NO: 178333 - DNA, 15 bp, Homo sapiens
caacatagaggaagg

SEQ ID NO: 178334 - DNA, 15 bp, Homo sapiens
aacatagaggaaggg

SEQ ID NO: 178335 - DNA, 15 bp, Homo sapiens
acatagaggaaggga

SEQ ID NO: 178336 - DNA, 15 bp, Homo sapiens
catagaggaagggaa

SEQ ID NO: 178337 - DNA, 15 bp, Homo sapiens
atagaggaagggaac

SEQ ID NO: 178338 - DNA, 15 bp, Homo sapiens
tagaggaagggaact

SEQ ID NO: 178339 - DNA, 15 bp, Homo sapiens
agaggaagggaacta

SEQ ID NO: 178340 - DNA, 15 bp, Homo sapiens
gaggaagggaactat

SEQ ID NO: 178341 - DNA, 15 bp, Homo sapiens
aggaagggaactatt

SEQ ID NO: 178342 - DNA, 15 bp, Homo sapiens
ggaagggaactatta

SEQ ID NO: 178343 - DNA, 15 bp, Homo sapiens
gaagggaactattaa

SEQ ID NO: 178344 - DNA, 15 bp, Homo sapiens
aagggaactattaat

SEQ ID NO: 178345 - DNA, 15 bp, Homo sapiens
agggaactattaata

SEQ ID NO: 178346 - DNA, 15 bp, Homo sapiens
gggaactattaataa

SEQ ID NO: 178347 - DNA, 15 bp, Homo sapiens
ggaactattaataag

SEQ ID NO: 178348 - DNA, 15 bp, Homo sapiens
gaactattaataaga

SEQ ID NO: 178349 - DNA, 15 bp, Homo sapiens
aactattaataagac

SEQ ID NO: 178350 - DNA, 15 bp, Homo sapiens
actattaataagact

SEQ ID NO: 178351 - DNA, 15 bp, Homo sapiens
ctattaataagactt

SEQ ID NO: 178352 - DNA, 15 bp, Homo sapiens
tattaataagacttg

SEQ ID NO: 178353 - DNA, 15 bp, Homo sapiens
attaataagacttga

SEQ ID NO: 178354 - DNA, 15 bp, Homo sapiens
ttaataagacttgac

SEQ ID NO: 178355 - DNA, 15 bp, Homo sapiens
taataagacttgaca

SEQ ID NO: 178356 - DNA, 15 bp, Homo sapiens
aataagacttgacac

SEQ ID NO: 178357 - DNA, 15 bp, Homo sapiens
ataagacttgacact

SEQ ID NO: 178358 - DNA, 15 bp, Homo sapiens
taagacttgacactg

SEQ ID NO: 178359 - DNA, 15 bp, Homo sapiens
aagacttgacactga

SEQ ID NO: 178360 - DNA, 15 bp, Homo sapiens
agacttgacactgag

SEQ ID NO: 178361 - DNA, 15 bp, Homo sapiens
gacttgacactgaga

SEQ ID NO: 178362 - DNA, 15 bp, Homo sapiens
acttgacactgagaa

SEQ ID NO: 178363 - DNA, 15 bp, Homo sapiens
cttgacactgagaag

SEQ ID NO: 178364 - DNA, 15 bp, Homo sapiens
ttgacactgagaagt

SEQ ID NO: 178365 - DNA, 15 bp, Homo sapiens
tgacactgagaagtc

SEQ ID NO: 178366 - DNA, 15 bp, Homo sapiens
gacactgagaagtca

SEQ ID NO: 178367 - DNA, 15 bp, Homo sapiens
acactgagaagtcaa

SEQ ID NO: 178368 - DNA, 15 bp, Homo sapiens
cactgagaagtcaac

SEQ ID NO: 178369 - DNA, 15 bp, Homo sapiens
actgagaagtcaact

SEQ ID NO: 178370 - DNA, 15 bp, Homo sapiens
ctgagaagtcaactg

SEQ ID NO: 178371 - DNA, 15 bp, Homo sapiens
tgagaagtcaactgt

SEQ ID NO: 178372 - DNA, 15 bp, Homo sapiens
gagaagtcaactgtt

SEQ ID NO: 178373 - DNA, 15 bp, Homo sapiens
agaagtcaactgttt

SEQ ID NO: 178374 - DNA, 15 bp, Homo sapiens
gaagtcaactgtttt

SEQ ID NO: 178375 - DNA, 15 bp, Homo sapiens
aagtcaactgtttta

SEQ ID NO: 178376 - DNA, 15 bp, Homo sapiens
agtcaactgttttac

SEQ ID NO: 178377 - DNA, 15 bp, Homo sapiens
gtcaactgttttact

SEQ ID NO: 178378 - DNA, 15 bp, Homo sapiens
tcaactgttttactt

SEQ ID NO: 178379 - DNA, 15 bp, Homo sapiens
caactgttttactta

SEQ ID NO: 178380 - DNA, 15 bp, Homo sapiens
aactgttttacttag

SEQ ID NO: 178381 - DNA, 15 bp, Homo sapiens
actgttttacttagt

SEQ ID NO: 178382 - DNA, 15 bp, Homo sapiens
ctgttttacttagtg

SEQ ID NO: 178383 - DNA, 15 bp, Homo sapiens
tgttttacttagtgc

SEQ ID NO: 178384 - DNA, 15 bp, Homo sapiens
gttttacttagtgct

SEQ ID NO: 178385 - DNA, 15 bp, Homo sapiens
ttttacttagtgctg

SEQ ID NO: 178386 - DNA, 15 bp, Homo sapiens
tttacttagtgctga

SEQ ID NO: 178387 - DNA, 15 bp, Homo sapiens
ttacttagtgctgaa

SEQ ID NO: 178388 - DNA, 15 bp, Homo sapiens
tacttagtgctgaaa

SEQ ID NO: 178389 - DNA, 15 bp, Homo sapiens
acttagtgctgaaag

SEQ ID NO: 178390 - DNA, 15 bp, Homo sapiens
cttagtgctgaaagt

SEQ ID NO: 178391 - DNA, 15 bp, Homo sapiens
ttagtgctgaaagtt

SEQ ID NO: 178392 - DNA, 15 bp, Homo sapiens
tagtgctgaaagtta

SEQ ID NO: 178393 - DNA, 15 bp, Homo sapiens
agtgctgaaagttaa

SEQ ID NO: 178394 - DNA, 15 bp, Homo sapiens
gtgctgaaagttaag

SEQ ID NO: 178395 - DNA, 15 bp, Homo sapiens
tgctgaaagttaagg

SEQ ID NO: 178396 - DNA, 15 bp, Homo sapiens
gctgaaagttaaggg

SEQ ID NO: 178397 - DNA, 15 bp, Homo sapiens
ctgaaagttaagggg

SEQ ID NO: 178398 - DNA, 15 bp, Homo sapiens
tgaaagttaagggga

SEQ ID NO: 178399 - DNA, 15 bp, Homo sapiens
gaaagttaaggggag

SEQ ID NO: 178400 - DNA, 15 bp, Homo sapiens
aaagttaaggggagt

SEQ ID NO: 178401 - DNA, 15 bp, Homo sapiens
aagttaaggggagtt

SEQ ID NO: 178402 - DNA, 15 bp, Homo sapiens
agttaaggggagttt

SEQ ID NO: 178403 - DNA, 15 bp, Homo sapiens
gttaaggggagtttt

SEQ ID NO: 178404 - DNA, 15 bp, Homo sapiens
ttaaggggagtttta

SEQ ID NO: 178405 - DNA, 15 bp, Homo sapiens
taaggggagttttaa

SEQ ID NO: 178406 - DNA, 15 bp, Homo sapiens
aaggggagttttaag

SEQ ID NO: 178407 - DNA, 15 bp, Homo sapiens
aggggagttttaagt

SEQ ID NO: 178408 - DNA, 15 bp, Homo sapiens
ggggagttttaagta

SEQ ID NO: 178409 - DNA, 15 bp, Homo sapiens
gggagttttaagtac

SEQ ID NO: 178410 - DNA, 15 bp, Homo sapiens
ggagttttaagtaca

SEQ ID NO: 178411 - DNA, 15 bp, Homo sapiens
gagttttaagtacat

SEQ ID NO: 178412 - DNA, 15 bp, Homo sapiens
agttttaagtacatt

SEQ ID NO: 178413 - DNA, 15 bp, Homo sapiens
gttttaagtacatta

SEQ ID NO: 178414 - DNA, 15 bp, Homo sapiens
ttttaagtacattag

SEQ ID NO: 178415 - DNA, 15 bp, Homo sapiens
tttaagtacattaga

SEQ ID NO: 178416 - DNA, 15 bp, Homo sapiens
ttaagtacattagaa

SEQ ID NO: 178417 - DNA, 15 bp, Homo sapiens
taagtacattagaat

SEQ ID NO: 178418 - DNA, 15 bp, Homo sapiens
aagtacattagaatc

SEQ ID NO: 178419 - DNA, 15 bp, Homo sapiens
agtacattagaatcc

SEQ ID NO: 178420 - DNA, 15 bp, Homo sapiens
gtacattagaatcca

SEQ ID NO: 178421 - DNA, 15 bp, Homo sapiens
tacattagaatccaa

SEQ ID NO: 178422 - DNA, 15 bp, Homo sapiens
acattagaatccaaa

SEQ ID NO: 178423 - DNA, 15 bp, Homo sapiens
cattagaatccaaac

SEQ ID NO: 178424 - DNA, 15 bp, Homo sapiens
attagaatccaaaca

SEQ ID NO: 178425 - DNA, 15 bp, Homo sapiens
ttagaatccaaacaa

SEQ ID NO: 178426 - DNA, 15 bp, Homo sapiens
tagaatccaaacaag

SEQ ID NO: 178427 - DNA, 15 bp, Homo sapiens
agaatccaaacaaga

SEQ ID NO: 178428 - DNA, 15 bp, Homo sapiens
gaatccaaacaagac

SEQ ID NO: 178429 - DNA, 15 bp, Homo sapiens
aatccaaacaagact

SEQ ID NO: 178430 - DNA, 15 bp, Homo sapiens
atccaaacaagactt

SEQ ID NO: 178431 - DNA, 15 bp, Homo sapiens
tccaaacaagacttt

SEQ ID NO: 178432 - DNA, 15 bp, Homo sapiens
ccaaacaagactttt

SEQ ID NO: 178433 - DNA, 15 bp, Homo sapiens
caaacaagacttttc

SEQ ID NO: 178434 - DNA, 15 bp, Homo sapiens
aaacaagacttttca

SEQ ID NO: 178435 - DNA, 15 bp, Homo sapiens
aacaagacttttcaa

SEQ ID NO: 178436 - DNA, 15 bp, Homo sapiens
acaagacttttcaaa

SEQ ID NO: 178437 - DNA, 15 bp, Homo sapiens
caagacttttcaaat

SEQ ID NO: 178438 - DNA, 15 bp, Homo sapiens
aagacttttcaaatc

SEQ ID NO: 178439 - DNA, 15 bp, Homo sapiens
agacttttcaaatct

SEQ ID NO: 178440 - DNA, 15 bp, Homo sapiens
gacttttcaaatctc

SEQ ID NO: 178441 - DNA, 15 bp, Homo sapiens
acttttcaaatctct

SEQ ID NO: 178442 - DNA, 15 bp, Homo sapiens
cttttcaaatctctt

SEQ ID NO: 178443 - DNA, 15 bp, Homo sapiens
ttttcaaatctctta

SEQ ID NO: 178444 - DNA, 15 bp, Homo sapiens
tttcaaatctcttat

SEQ ID NO: 178445 - DNA, 15 bp, Homo sapiens
ttcaaatctcttata

SEQ ID NO: 178446 - DNA, 15 bp, Homo sapiens
tcaaatctcttataa

SEQ ID NO: 178447 - DNA, 15 bp, Homo sapiens
caaatctcttataat

SEQ ID NO: 178448 - DNA, 15 bp, Homo sapiens
aaatctcttataatc

SEQ ID NO: 178449 - DNA, 15 bp, Homo sapiens
aatctcttataatct

SEQ ID NO: 178450 - DNA, 15 bp, Homo sapiens
atctcttataatcta

SEQ ID NO: 178451 - DNA, 15 bp, Homo sapiens
tctcttataatctaa

SEQ ID NO: 178452 - DNA, 15 bp, Homo sapiens
ctcttataatctaaa

SEQ ID NO: 178453 - DNA, 15 bp, Homo sapiens
tcttataatctaaaa

SEQ ID NO: 178454 - DNA, 15 bp, Homo sapiens
cttataatctaaaat

SEQ ID NO: 178455 - DNA, 15 bp, Homo sapiens
ttataatctaaaata

SEQ ID NO: 178456 - DNA, 15 bp, Homo sapiens
tataatctaaaataa

SEQ ID NO: 178457 - DNA, 15 bp, Homo sapiens
ataatctaaaataaa

SEQ ID NO: 178458 - DNA, 15 bp, Homo sapiens
taatctaaaataaaa

SEQ ID NO: 178459 - DNA, 15 bp, Homo sapiens
aatctaaaataaaat

SEQ ID NO: 178460 - DNA, 15 bp, Homo sapiens
atctaaaataaaata

SEQ ID NO: 178461 - DNA, 15 bp, Homo sapiens
tctaaaataaaatac

SEQ ID NO: 178462 - DNA, 15 bp, Homo sapiens
ctaaaataaaataca

SEQ ID NO: 178463 - DNA, 15 bp, Homo sapiens
taaaataaaatacaa

SEQ ID NO: 178464 - DNA, 15 bp, Homo sapiens
aaaataaaatacaaa

SEQ ID NO: 178465 - DNA, 15 bp, Homo sapiens
aaataaaatacaaag

SEQ ID NO: 178466 - DNA, 15 bp, Homo sapiens
aataaaatacaaagt

SEQ ID NO: 178467 - DNA, 15 bp, Homo sapiens
ataaaatacaaagtt

SEQ ID NO: 178468 - DNA, 15 bp, Homo sapiens
taaaatacaaagttg

SEQ ID NO: 178469 - DNA, 15 bp, Homo sapiens
aaaatacaaagttga

SEQ ID NO: 178470 - DNA, 15 bp, Homo sapiens
aaatacaaagttgag

SEQ ID NO: 178471 - DNA, 15 bp, Homo sapiens
aatacaaagttgagt

SEQ ID NO: 178472 - DNA, 15 bp, Homo sapiens
atacaaagttgagtt

SEQ ID NO: 178473 - DNA, 15 bp, Homo sapiens
tacaaagttgagttt

SEQ ID NO: 178474 - DNA, 15 bp, Homo sapiens
acaaagttgagttta

SEQ ID NO: 178475 - DNA, 15 bp, Homo sapiens
caaagttgagtttat

SEQ ID NO: 178476 - DNA, 15 bp, Homo sapiens
aaagttgagtttatg

SEQ ID NO: 178477 - DNA, 15 bp, Homo sapiens
aagttgagtttatgg

SEQ ID NO: 178478 - DNA, 15 bp, Homo sapiens
agttgagtttatggg

SEQ ID NO: 178479 - DNA, 15 bp, Homo sapiens
gttgagtttatggga

SEQ ID NO: 178480 - DNA, 15 bp, Homo sapiens
ttgagtttatgggag

SEQ ID NO: 178481 - DNA, 15 bp, Homo sapiens
tgagtttatgggaga

SEQ ID NO: 178482 - DNA, 15 bp, Homo sapiens
gagtttatgggagac

SEQ ID NO: 178483 - DNA, 15 bp, Homo sapiens
agtttatgggagaca

SEQ ID NO: 178484 - DNA, 15 bp, Homo sapiens
gtttatgggagacat

SEQ ID NO: 178485 - DNA, 15 bp, Homo sapiens
tttatgggagacata

SEQ ID NO: 178486 - DNA, 15 bp, Homo sapiens
ttatgggagacataa

SEQ ID NO: 178487 - DNA, 15 bp, Homo sapiens
tatgggagacataaa

SEQ ID NO: 178488 - DNA, 15 bp, Homo sapiens
atgggagacataaaa

SEQ ID NO: 178489 - DNA, 15 bp, Homo sapiens
tgggagacataaaat

SEQ ID NO: 178490 - DNA, 15 bp, Homo sapiens
gggagacataaaatg

SEQ ID NO: 178491 - DNA, 15 bp, Homo sapiens
ggagacataaaatga

SEQ ID NO: 178492 - DNA, 15 bp, Homo sapiens
gagacataaaatgaa

SEQ ID NO: 178493 - DNA, 15 bp, Homo sapiens
agacataaaatgaaa

SEQ ID NO: 178494 - DNA, 15 bp, Homo sapiens
gacataaaatgaaat

SEQ ID NO: 178495 - DNA, 15 bp, Homo sapiens
acataaaatgaaatt

SEQ ID NO: 178496 - DNA, 15 bp, Homo sapiens
cataaaatgaaattt

SEQ ID NO: 178497 - DNA, 15 bp, Homo sapiens
ataaaatgaaattta

SEQ ID NO: 178498 - DNA, 15 bp, Homo sapiens
taaaatgaaatttaa

SEQ ID NO: 178499 - DNA, 15 bp, Homo sapiens
aaaatgaaatttaaa

SEQ ID NO: 178500 - DNA, 15 bp, Homo sapiens
aaatgaaatttaaat

SEQ ID NO: 178501 - DNA, 15 bp, Homo sapiens
aatgaaatttaaatt

SEQ ID NO: 178502 - DNA, 15 bp, Homo sapiens
atgaaatttaaatta

SEQ ID NO: 178503 - DNA, 15 bp, Homo sapiens
tgaaatttaaattag

SEQ ID NO: 178504 - DNA, 15 bp, Homo sapiens
gaaatttaaattagt

SEQ ID NO: 178505 - DNA, 15 bp, Homo sapiens
aaatttaaattagtt

SEQ ID NO: 178506 - DNA, 15 bp, Homo sapiens
aatttaaattagttt

SEQ ID NO: 178507 - DNA, 15 bp, Homo sapiens
atttaaattagttta

SEQ ID NO: 178508 - DNA, 15 bp, Homo sapiens
tttaaattagtttat

SEQ ID NO: 178509 - DNA, 15 bp, Homo sapiens
ttaaattagtttatg

SEQ ID NO: 178510 - DNA, 15 bp, Homo sapiens
taaattagtttatgc

SEQ ID NO: 178511 - DNA, 15 bp, Homo sapiens
aaattagtttatgct

SEQ ID NO: 178512 - DNA, 15 bp, Homo sapiens
aattagtttatgctt

SEQ ID NO: 178513 - DNA, 15 bp, Homo sapiens
attagtttatgcttt

SEQ ID NO: 178514 - DNA, 15 bp, Homo sapiens
ttagtttatgctttt

SEQ ID NO: 178515 - DNA, 15 bp, Homo sapiens
tagtttatgcttttc

SEQ ID NO: 178516 - DNA, 15 bp, Homo sapiens
agtttatgcttttcg

SEQ ID NO: 178517 - DNA, 15 bp, Homo sapiens
gtttatgcttttcga

SEQ ID NO: 178518 - DNA, 15 bp, Homo sapiens
tttatgcttttcgaa

SEQ ID NO: 178519 - DNA, 15 bp, Homo sapiens
ttatgcttttcgaat

SEQ ID NO: 178520 - DNA, 15 bp, Homo sapiens
tatgcttttcgaatc

SEQ ID NO: 178521 - DNA, 15 bp, Homo sapiens
atgcttttcgaatct

SEQ ID NO: 178522 - DNA, 15 bp, Homo sapiens
tgcttttcgaatctg

SEQ ID NO: 178523 - DNA, 15 bp, Homo sapiens
gcttttcgaatctga

SEQ ID NO: 178524 - DNA, 15 bp, Homo sapiens
cttttcgaatctgac

SEQ ID NO: 178525 - DNA, 15 bp, Homo sapiens
ttttcgaatctgacc

SEQ ID NO: 178526 - DNA, 15 bp, Homo sapiens
tttcgaatctgacct

SEQ ID NO: 178527 - DNA, 15 bp, Homo sapiens
ttcgaatctgacctc

SEQ ID NO: 178528 - DNA, 15 bp, Homo sapiens
tcgaatctgacctct

SEQ ID NO: 178529 - DNA, 15 bp, Homo sapiens
cgaatctgacctctg

SEQ ID NO: 178530 - DNA, 15 bp, Homo sapiens
gaatctgacctctgt

SEQ ID NO: 178531 - DNA, 15 bp, Homo sapiens
aatctgacctctgtt

SEQ ID NO: 178532 - DNA, 15 bp, Homo sapiens
atctgacctctgttt

SEQ ID NO: 178533 - DNA, 15 bp, Homo sapiens
tctgacctctgttta

SEQ ID NO: 178534 - DNA, 15 bp, Homo sapiens
ctgacctctgtttaa

SEQ ID NO: 178535 - DNA, 15 bp, Homo sapiens
tgacctctgtttaaa

SEQ ID NO: 178536 - DNA, 15 bp, Homo sapiens
gacctctgtttaaaa

SEQ ID NO: 178537 - DNA, 15 bp, Homo sapiens
acctctgtttaaaat

SEQ ID NO: 178538 - DNA, 15 bp, Homo sapiens
cctctgtttaaaatt

SEQ ID NO: 178539 - DNA, 15 bp, Homo sapiens
ctctgtttaaaatta

SEQ ID NO: 178540 - DNA, 15 bp, Homo sapiens
tctgtttaaaattag

SEQ ID NO: 178541 - DNA, 15 bp, Homo sapiens
ctgtttaaaattaga

SEQ ID NO: 178542 - DNA, 15 bp, Homo sapiens
tgtttaaaattagat

SEQ ID NO: 178543 - DNA, 15 bp, Homo sapiens
gtttaaaattagata

SEQ ID NO: 178544 - DNA, 15 bp, Homo sapiens
tttaaaattagatag

SEQ ID NO: 178545 - DNA, 15 bp, Homo sapiens
ttaaaattagataga

SEQ ID NO: 178546 - DNA, 15 bp, Homo sapiens
taaaattagatagag

SEQ ID NO: 178547 - DNA, 15 bp, Homo sapiens
aaaattagatagagg

SEQ ID NO: 178548 - DNA, 15 bp, Homo sapiens
aaattagatagaggt

SEQ ID NO: 178549 - DNA, 15 bp, Homo sapiens
aattagatagaggta

SEQ ID NO: 178550 - DNA, 15 bp, Homo sapiens
attagatagaggtaa

SEQ ID NO: 178551 - DNA, 15 bp, Homo sapiens
ttagatagaggtaat

SEQ ID NO: 178552 - DNA, 15 bp, Homo sapiens
tagatagaggtaatt

SEQ ID NO: 178553 - DNA, 15 bp, Homo sapiens
agatagaggtaatta

SEQ ID NO: 178554 - DNA, 15 bp, Homo sapiens
gatagaggtaattat

SEQ ID NO: 178555 - DNA, 15 bp, Homo sapiens
atagaggtaattatt

SEQ ID NO: 178556 - DNA, 15 bp, Homo sapiens
tagaggtaattattt

SEQ ID NO: 178557 - DNA, 15 bp, Homo sapiens
agaggtaattatttc

SEQ ID NO: 178558 - DNA, 15 bp, Homo sapiens
gaggtaattatttcc

SEQ ID NO: 178559 - DNA, 15 bp, Homo sapiens
aggtaattatttcct

SEQ ID NO: 178560 - DNA, 15 bp, Homo sapiens
ggtaattatttcctt

SEQ ID NO: 178561 - DNA, 15 bp, Homo sapiens
gtaattatttccttt

SEQ ID NO: 178562 - DNA, 15 bp, Homo sapiens
taattatttccttta

SEQ ID NO: 178563 - DNA, 15 bp, Homo sapiens
aattatttcctttag

SEQ ID NO: 178564 - DNA, 15 bp, Homo sapiens
attatttcctttagt

SEQ ID NO: 178565 - DNA, 15 bp, Homo sapiens
ttatttcctttagtg

SEQ ID NO: 178566 - DNA, 15 bp, Homo sapiens
tatttcctttagtga

SEQ ID NO: 178567 - DNA, 15 bp, Homo sapiens
atttcctttagtgag

SEQ ID NO: 178568 - DNA, 15 bp, Homo sapiens
tttcctttagtgagc

SEQ ID NO: 178569 - DNA, 15 bp, Homo sapiens
ttcctttagtgagca

SEQ ID NO: 178570 - DNA, 15 bp, Homo sapiens
tcctttagtgagcaa

SEQ ID NO: 178571 - DNA, 15 bp, Homo sapiens
cctttagtgagcaag

SEQ ID NO: 178572 - DNA, 15 bp, Homo sapiens
ctttagtgagcaaga

SEQ ID NO: 178573 - DNA, 15 bp, Homo sapiens
tttagtgagcaagaa

SEQ ID NO: 178574 - DNA, 15 bp, Homo sapiens
ttagtgagcaagaag

SEQ ID NO: 178575 - DNA, 15 bp, Homo sapiens
tagtgagcaagaagt

SEQ ID NO: 178576 - DNA, 15 bp, Homo sapiens
agtgagcaagaagtg

SEQ ID NO: 178577 - DNA, 15 bp, Homo sapiens
gtgagcaagaagtga

SEQ ID NO: 178578 - DNA, 15 bp, Homo sapiens
tgagcaagaagtgaa

SEQ ID NO: 178579 - DNA, 15 bp, Homo sapiens
gagcaagaagtgaaa

SEQ ID NO: 178580 - DNA, 15 bp, Homo sapiens
agcaagaagtgaaat

SEQ ID NO: 178581 - DNA, 15 bp, Homo sapiens
gcaagaagtgaaatc

SEQ ID NO: 178582 - DNA, 15 bp, Homo sapiens
caagaagtgaaatca

SEQ ID NO: 178583 - DNA, 15 bp, Homo sapiens
aagaagtgaaatcag

SEQ ID NO: 178584 - DNA, 15 bp, Homo sapiens
agaagtgaaatcagg

SEQ ID NO: 178585 - DNA, 15 bp, Homo sapiens
gaagtgaaatcagga

SEQ ID NO: 178586 - DNA, 15 bp, Homo sapiens
aagtgaaatcaggaa

SEQ ID NO: 178587 - DNA, 15 bp, Homo sapiens
agtgaaatcaggaag

SEQ ID NO: 178588 - DNA, 15 bp, Homo sapiens
gtgaaatcaggaaga

SEQ ID NO: 178589 - DNA, 15 bp, Homo sapiens
tgaaatcaggaagaa

SEQ ID NO: 178590 - DNA, 15 bp, Homo sapiens
gaaatcaggaagaag

SEQ ID NO: 178591 - DNA, 15 bp, Homo sapiens
aaatcaggaagaaga

SEQ ID NO: 178592 - DNA, 15 bp, Homo sapiens
aatcaggaagaagac

SEQ ID NO: 178593 - DNA, 15 bp, Homo sapiens
atcaggaagaagaca

SEQ ID NO: 178594 - DNA, 15 bp, Homo sapiens
tcaggaagaagacaa

SEQ ID NO: 178595 - DNA, 15 bp, Homo sapiens
caggaagaagacaaa

SEQ ID NO: 178596 - DNA, 15 bp, Homo sapiens
aggaagaagacaaat

SEQ ID NO: 178597 - DNA, 15 bp, Homo sapiens
ggaagaagacaaatc

SEQ ID NO: 178598 - DNA, 15 bp, Homo sapiens
gaagaagacaaatct

SEQ ID NO: 178599 - DNA, 15 bp, Homo sapiens
aagaagacaaatctt

SEQ ID NO: 178600 - DNA, 15 bp, Homo sapiens
agaagacaaatcttt

SEQ ID NO: 178601 - DNA, 15 bp, Homo sapiens
gaagacaaatctttt

SEQ ID NO: 178602 - DNA, 15 bp, Homo sapiens
aagacaaatcttttc

SEQ ID NO: 178603 - DNA, 15 bp, Homo sapiens
agacaaatcttttca

SEQ ID NO: 178604 - DNA, 15 bp, Homo sapiens
gacaaatcttttcaa

SEQ ID NO: 178605 - DNA, 15 bp, Homo sapiens
acaaatcttttcaaa

SEQ ID NO: 178606 - DNA, 15 bp, Homo sapiens
caaatcttttcaaac

SEQ ID NO: 178607 - DNA, 15 bp, Homo sapiens
aaatcttttcaaact

SEQ ID NO: 178608 - DNA, 15 bp, Homo sapiens
aatcttttcaaactg

SEQ ID NO: 178609 - DNA, 15 bp, Homo sapiens
atcttttcaaactga

SEQ ID NO: 178610 - DNA, 15 bp, Homo sapiens
tcttttcaaactgag

SEQ ID NO: 178611 - DNA, 15 bp, Homo sapiens
cttttcaaactgaga

SEQ ID NO: 178612 - DNA, 15 bp, Homo sapiens
ttttcaaactgagaa

SEQ ID NO: 178613 - DNA, 15 bp, Homo sapiens
tttcaaactgagaaa

SEQ ID NO: 178614 - DNA, 15 bp, Homo sapiens
ttcaaactgagaaac

SEQ ID NO: 178615 - DNA, 15 bp, Homo sapiens
tcaaactgagaaaca

SEQ ID NO: 178616 - DNA, 15 bp, Homo sapiens
caaactgagaaacaa

SEQ ID NO: 178617 - DNA, 15 bp, Homo sapiens
aaactgagaaacaag

SEQ ID NO: 178618 - DNA, 15 bp, Homo sapiens
aactgagaaacaaga

SEQ ID NO: 178619 - DNA, 15 bp, Homo sapiens
actgagaaacaagaa

SEQ ID NO: 178620 - DNA, 15 bp, Homo sapiens
ctgagaaacaagaaa

SEQ ID NO: 178621 - DNA, 15 bp, Homo sapiens
tgagaaacaagaaag

SEQ ID NO: 178622 - DNA, 15 bp, Homo sapiens
gagaaacaagaaaga

SEQ ID NO: 178623 - DNA, 15 bp, Homo sapiens
agaaacaagaaagag

SEQ ID NO: 178624 - DNA, 15 bp, Homo sapiens
gaaacaagaaagagg

SEQ ID NO: 178625 - DNA, 15 bp, Homo sapiens
aaacaagaaagagga

SEQ ID NO: 178626 - DNA, 15 bp, Homo sapiens
aacaagaaagaggaa

SEQ ID NO: 178627 - DNA, 15 bp, Homo sapiens
acaagaaagaggaag

SEQ ID NO: 178628 - DNA, 15 bp, Homo sapiens
caagaaagaggaaga

SEQ ID NO: 178629 - DNA, 15 bp, Homo sapiens
aagaaagaggaagac

SEQ ID NO: 178630 - DNA, 15 bp, Homo sapiens
agaaagaggaagaca

SEQ ID NO: 178631 - DNA, 15 bp, Homo sapiens
gaaagaggaagacac

SEQ ID NO: 178632 - DNA, 15 bp, Homo sapiens
aaagaggaagacaca

SEQ ID NO: 178633 - DNA, 15 bp, Homo sapiens
aagaggaagacacaa

SEQ ID NO: 178634 - DNA, 15 bp, Homo sapiens
agaggaagacacaaa

SEQ ID NO: 178635 - DNA, 15 bp, Homo sapiens
gaggaagacacaaaa

SEQ ID NO: 178636 - DNA, 15 bp, Homo sapiens
aggaagacacaaaag

SEQ ID NO: 178637 - DNA, 15 bp, Homo sapiens
ggaagacacaaaagt

SEQ ID NO: 178638 - DNA, 15 bp, Homo sapiens
gaagacacaaaagtt

SEQ ID NO: 178639 - DNA, 15 bp, Homo sapiens
aagacacaaaagtta

SEQ ID NO: 178640 - DNA, 15 bp, Homo sapiens
agacacaaaagttaa

SEQ ID NO: 178641 - DNA, 15 bp, Homo sapiens
gacacaaaagttaaa

SEQ ID NO: 178642 - DNA, 15 bp, Homo sapiens
acacaaaagttaaac

SEQ ID NO: 178643 - DNA, 15 bp, Homo sapiens
cacaaaagttaaact

SEQ ID NO: 178644 - DNA, 15 bp, Homo sapiens
acaaaagttaaacta

SEQ ID NO: 178645 - DNA, 15 bp, Homo sapiens
caaaagttaaactac

SEQ ID NO: 178646 - DNA, 15 bp, Homo sapiens
aaaagttaaactaca

SEQ ID NO: 178647 - DNA, 15 bp, Homo sapiens
aaagttaaactacaa

SEQ ID NO: 178648 - DNA, 15 bp, Homo sapiens
aagttaaactacaat

SEQ ID NO: 178649 - DNA, 15 bp, Homo sapiens
agttaaactacaata

SEQ ID NO: 178650 - DNA, 15 bp, Homo sapiens
gttaaactacaataa

SEQ ID NO: 178651 - DNA, 15 bp, Homo sapiens
ttaaactacaataat

SEQ ID NO: 178652 - DNA, 15 bp, Homo sapiens
taaactacaataatg

SEQ ID NO: 178653 - DNA, 15 bp, Homo sapiens
aaactacaataatgt

SEQ ID NO: 178654 - DNA, 15 bp, Homo sapiens
aactacaataatgta

SEQ ID NO: 178655 - DNA, 15 bp, Homo sapiens
actacaataatgtag

SEQ ID NO: 178656 - DNA, 15 bp, Homo sapiens
ctacaataatgtagc

SEQ ID NO: 178657 - DNA, 15 bp, Homo sapiens
tacaataatgtagct

SEQ ID NO: 178658 - DNA, 15 bp, Homo sapiens
acaataatgtagctt

SEQ ID NO: 178659 - DNA, 15 bp, Homo sapiens
caataatgtagctta

SEQ ID NO: 178660 - DNA, 15 bp, Homo sapiens
aataatgtagcttag

SEQ ID NO: 178661 - DNA, 15 bp, Homo sapiens
ataatgtagcttagc

SEQ ID NO: 178662 - DNA, 15 bp, Homo sapiens
taatgtagcttagca

SEQ ID NO: 178663 - DNA, 15 bp, Homo sapiens
aatgtagcttagcag

SEQ ID NO: 178664 - DNA, 15 bp, Homo sapiens
atgtagcttagcagt

SEQ ID NO: 178665 - DNA, 15 bp, Homo sapiens
tgtagcttagcagtg

SEQ ID NO: 178666 - DNA, 15 bp, Homo sapiens
gtagcttagcagtgt

SEQ ID NO: 178667 - DNA, 15 bp, Homo sapiens
tagcttagcagtgta

SEQ ID NO: 178668 - DNA, 15 bp, Homo sapiens
agcttagcagtgtaa

SEQ ID NO: 178669 - DNA, 15 bp, Homo sapiens
gcttagcagtgtaag

SEQ ID NO: 178670 - DNA, 15 bp, Homo sapiens
cttagcagtgtaagt

SEQ ID NO: 178671 - DNA, 15 bp, Homo sapiens
ttagcagtgtaagtt

SEQ ID NO: 178672 - DNA, 15 bp, Homo sapiens
tagcagtgtaagtta

SEQ ID NO: 178673 - DNA, 15 bp, Homo sapiens
agcagtgtaagttaa

SEQ ID NO: 178674 - DNA, 15 bp, Homo sapiens
gcagtgtaagttaat

SEQ ID NO: 178675 - DNA, 15 bp, Homo sapiens
cagtgtaagttaatt

SEQ ID NO: 178676 - DNA, 15 bp, Homo sapiens
agtgtaagttaattc

SEQ ID NO: 178677 - DNA, 15 bp, Homo sapiens
gtgtaagttaattca

SEQ ID NO: 178678 - DNA, 15 bp, Homo sapiens
tgtaagttaattcat

SEQ ID NO: 178679 - DNA, 15 bp, Homo sapiens
gtaagttaattcatt

SEQ ID NO: 178680 - DNA, 15 bp, Homo sapiens
taagttaattcattc

SEQ ID NO: 178681 - DNA, 15 bp, Homo sapiens
aagttaattcattcc

SEQ ID NO: 178682 - DNA, 15 bp, Homo sapiens
agttaattcattccc

SEQ ID NO: 178683 - DNA, 15 bp, Homo sapiens
gttaattcattcccc

SEQ ID NO: 178684 - DNA, 15 bp, Homo sapiens
ttaattcattccccc

SEQ ID NO: 178685 - DNA, 15 bp, Homo sapiens
taattcattccccca

SEQ ID NO: 178686 - DNA, 15 bp, Homo sapiens
aattcattcccccaa

SEQ ID NO: 178687 - DNA, 15 bp, Homo sapiens
attcattcccccaaa

SEQ ID NO: 178688 - DNA, 15 bp, Homo sapiens
ttcattcccccaaaa

SEQ ID NO: 178689 - DNA, 15 bp, Homo sapiens
tcattcccccaaaac

SEQ ID NO: 178690 - DNA, 15 bp, Homo sapiens
cattcccccaaaaca

SEQ ID NO: 178691 - DNA, 15 bp, Homo sapiens
attcccccaaaacag

SEQ ID NO: 178692 - DNA, 15 bp, Homo sapiens
ttcccccaaaacagt

SEQ ID NO: 178693 - DNA, 15 bp, Homo sapiens
tcccccaaaacagtc

SEQ ID NO: 178694 - DNA, 15 bp, Homo sapiens
cccccaaaacagtca

SEQ ID NO: 178695 - DNA, 15 bp, Homo sapiens
ccccaaaacagtcag

SEQ ID NO: 178696 - DNA, 15 bp, Homo sapiens
cccaaaacagtcagt

SEQ ID NO: 178697 - DNA, 15 bp, Homo sapiens
ccaaaacagtcagtt

SEQ ID NO: 178698 - DNA, 15 bp, Homo sapiens
caaaacagtcagttt

SEQ ID NO: 178699 - DNA, 15 bp, Homo sapiens
aaaacagtcagttta

SEQ ID NO: 178700 - DNA, 15 bp, Homo sapiens
aaacagtcagtttac

SEQ ID NO: 178701 - DNA, 15 bp, Homo sapiens
aacagtcagtttaca

SEQ ID NO: 178702 - DNA, 15 bp, Homo sapiens
acagtcagtttacaa

SEQ ID NO: 178703 - DNA, 15 bp, Homo sapiens
cagtcagtttacaag

SEQ ID NO: 178704 - DNA, 15 bp, Homo sapiens
agtcagtttacaagc

SEQ ID NO: 178705 - DNA, 15 bp, Homo sapiens
gtcagtttacaagca

SEQ ID NO: 178706 - DNA, 15 bp, Homo sapiens
tcagtttacaagcaa

SEQ ID NO: 178707 - DNA, 15 bp, Homo sapiens
cagtttacaagcaaa

SEQ ID NO: 178708 - DNA, 15 bp, Homo sapiens
agtttacaagcaaag

SEQ ID NO: 178709 - DNA, 15 bp, Homo sapiens
gtttacaagcaaaga

SEQ ID NO: 178710 - DNA, 15 bp, Homo sapiens
tttacaagcaaagat

SEQ ID NO: 178711 - DNA, 15 bp, Homo sapiens
ttacaagcaaagatg

SEQ ID NO: 178712 - DNA, 15 bp, Homo sapiens
tacaagcaaagatgt

SEQ ID NO: 178713 - DNA, 15 bp, Homo sapiens
acaagcaaagatgta

SEQ ID NO: 178714 - DNA, 15 bp, Homo sapiens
caagcaaagatgtac

SEQ ID NO: 178715 - DNA, 15 bp, Homo sapiens
aagcaaagatgtact

SEQ ID NO: 178716 - DNA, 15 bp, Homo sapiens
agcaaagatgtactt

SEQ ID NO: 178717 - DNA, 15 bp, Homo sapiens
gcaaagatgtactta

SEQ ID NO: 178718 - DNA, 15 bp, Homo sapiens
caaagatgtacttaa

SEQ ID NO: 178719 - DNA, 15 bp, Homo sapiens
aaagatgtacttaat

SEQ ID NO: 178720 - DNA, 15 bp, Homo sapiens
aagatgtacttaatg

SEQ ID NO: 178721 - DNA, 15 bp, Homo sapiens
agatgtacttaatga

SEQ ID NO: 178722 - DNA, 15 bp, Homo sapiens
gatgtacttaatgat

SEQ ID NO: 178723 - DNA, 15 bp, Homo sapiens
atgtacttaatgatt

SEQ ID NO: 178724 - DNA, 15 bp, Homo sapiens
tgtacttaatgattt

SEQ ID NO: 178725 - DNA, 15 bp, Homo sapiens
gtacttaatgattta

SEQ ID NO: 178726 - DNA, 15 bp, Homo sapiens
tacttaatgatttaa

SEQ ID NO: 178727 - DNA, 15 bp, Homo sapiens
acttaatgatttaag

SEQ ID NO: 178728 - DNA, 15 bp, Homo sapiens
cttaatgatttaaga

SEQ ID NO: 178729 - DNA, 15 bp, Homo sapiens
ttaatgatttaagat

SEQ ID NO: 178730 - DNA, 15 bp, Homo sapiens
taatgatttaagatt

SEQ ID NO: 178731 - DNA, 15 bp, Homo sapiens
aatgatttaagatta

SEQ ID NO: 178732 - DNA, 15 bp, Homo sapiens
atgatttaagattag

SEQ ID NO: 178733 - DNA, 15 bp, Homo sapiens
tgatttaagattagc

SEQ ID NO: 178734 - DNA, 15 bp, Homo sapiens
gatttaagattagct

SEQ ID NO: 178735 - DNA, 15 bp, Homo sapiens
atttaagattagctg

SEQ ID NO: 178736 - DNA, 15 bp, Homo sapiens
tttaagattagctga

SEQ ID NO: 178737 - DNA, 15 bp, Homo sapiens
ttaagattagctgac

SEQ ID NO: 178738 - DNA, 15 bp, Homo sapiens
taagattagctgact

SEQ ID NO: 178739 - DNA, 15 bp, Homo sapiens
aagattagctgactt

SEQ ID NO: 178740 - DNA, 15 bp, Homo sapiens
agattagctgacttt

SEQ ID NO: 178741 - DNA, 15 bp, Homo sapiens
gattagctgactttg

SEQ ID NO: 178742 - DNA, 15 bp, Homo sapiens
attagctgactttgt

SEQ ID NO: 178743 - DNA, 15 bp, Homo sapiens
ttagctgactttgtg

SEQ ID NO: 178744 - DNA, 15 bp, Homo sapiens
tagctgactttgtgg

SEQ ID NO: 178745 - DNA, 15 bp, Homo sapiens
agctgactttgtgga

SEQ ID NO: 178746 - DNA, 15 bp, Homo sapiens
gctgactttgtggaa

SEQ ID NO: 178747 - DNA, 15 bp, Homo sapiens
ctgactttgtggaaa

SEQ ID NO: 178748 - DNA, 15 bp, Homo sapiens
tgactttgtggaaaa

SEQ ID NO: 178749 - DNA, 15 bp, Homo sapiens
gactttgtggaaaaa

SEQ ID NO: 178750 - DNA, 15 bp, Homo sapiens
actttgtggaaaaaa

SEQ ID NO: 178751 - DNA, 15 bp, Homo sapiens
ctttgtggaaaaaat

SEQ ID NO: 178752 - DNA, 15 bp, Homo sapiens
tttgtggaaaaaata

SEQ ID NO: 178753 - DNA, 15 bp, Homo sapiens
ttgtggaaaaaatac

SEQ ID NO: 178754 - DNA, 15 bp, Homo sapiens
tgtggaaaaaatact

SEQ ID NO: 178755 - DNA, 15 bp, Homo sapiens
gtggaaaaaatactt

SEQ ID NO: 178756 - DNA, 15 bp, Homo sapiens
tggaaaaaatacttt

SEQ ID NO: 178757 - DNA, 15 bp, Homo sapiens
ggaaaaaatactttt

SEQ ID NO: 178758 - DNA, 15 bp, Homo sapiens
gaaaaaatactttta

SEQ ID NO: 178759 - DNA, 15 bp, Homo sapiens
aaaaaatacttttat

SEQ ID NO: 178760 - DNA, 15 bp, Homo sapiens
aaaaatacttttata

SEQ ID NO: 178761 - DNA, 15 bp, Homo sapiens
aaaatacttttatat

SEQ ID NO: 178762 - DNA, 15 bp, Homo sapiens
aaatacttttatatt

SEQ ID NO: 178763 - DNA, 15 bp, Homo sapiens
aatacttttatattt

SEQ ID NO: 178764 - DNA, 15 bp, Homo sapiens
atacttttatattta

SEQ ID NO: 178765 - DNA, 15 bp, Homo sapiens
tacttttatatttaa

SEQ ID NO: 178766 - DNA, 15 bp, Homo sapiens
acttttatatttaaa

SEQ ID NO: 178767 - DNA, 15 bp, Homo sapiens
cttttatatttaaaa

SEQ ID NO: 178768 - DNA, 15 bp, Homo sapiens
ttttatatttaaaag

SEQ ID NO: 178769 - DNA, 15 bp, Homo sapiens
tttatatttaaaagt

SEQ ID NO: 178770 - DNA, 15 bp, Homo sapiens
ttatatttaaaagtt

SEQ ID NO: 178771 - DNA, 15 bp, Homo sapiens
tatatttaaaagttt

SEQ ID NO: 178772 - DNA, 15 bp, Homo sapiens
atatttaaaagttta

SEQ ID NO: 178773 - DNA, 15 bp, Homo sapiens
tatttaaaagtttat

SEQ ID NO: 178774 - DNA, 15 bp, Homo sapiens
atttaaaagtttata

SEQ ID NO: 178775 - DNA, 15 bp, Homo sapiens
tttaaaagtttatac

SEQ ID NO: 178776 - DNA, 15 bp, Homo sapiens
ttaaaagtttataca

SEQ ID NO: 178777 - DNA, 15 bp, Homo sapiens
taaaagtttatacat

SEQ ID NO: 178778 - DNA, 15 bp, Homo sapiens
aaaagtttatacatt

SEQ ID NO: 178779 - DNA, 15 bp, Homo sapiens
aaagtttatacattt

SEQ ID NO: 178780 - DNA, 15 bp, Homo sapiens
aagtttatacatttt

SEQ ID NO: 178781 - DNA, 15 bp, Homo sapiens
agtttatacatttta

SEQ ID NO: 178782 - DNA, 15 bp, Homo sapiens
gtttatacattttaa

SEQ ID NO: 178783 - DNA, 15 bp, Homo sapiens
tttatacattttaaa

SEQ ID NO: 178784 - DNA, 15 bp, Homo sapiens
ttatacattttaaaa

SEQ ID NO: 178785 - DNA, 15 bp, Homo sapiens
tatacattttaaaac

SEQ ID NO: 178786 - DNA, 15 bp, Homo sapiens
atacattttaaaact

SEQ ID NO: 178787 - DNA, 15 bp, Homo sapiens
tacattttaaaactg

SEQ ID NO: 178788 - DNA, 15 bp, Homo sapiens
acattttaaaactgt

SEQ ID NO: 178789 - DNA, 15 bp, Homo sapiens
cattttaaaactgtg

SEQ ID NO: 178790 - DNA, 15 bp, Homo sapiens
attttaaaactgtga

SEQ ID NO: 178791 - DNA, 15 bp, Homo sapiens
ttttaaaactgtgac

SEQ ID NO: 178792 - DNA, 15 bp, Homo sapiens
tttaaaactgtgaca

SEQ ID NO: 178793 - DNA, 15 bp, Homo sapiens
ttaaaactgtgacaa

SEQ ID NO: 178794 - DNA, 15 bp, Homo sapiens
taaaactgtgacaaa

SEQ ID NO: 178795 - DNA, 15 bp, Homo sapiens
aaaactgtgacaaaa

SEQ ID NO: 178796 - DNA, 15 bp, Homo sapiens
aaactgtgacaaaat

SEQ ID NO: 178797 - DNA, 15 bp, Homo sapiens
aactgtgacaaaatt

SEQ ID NO: 178798 - DNA, 15 bp, Homo sapiens
actgtgacaaaattt

SEQ ID NO: 178799 - DNA, 15 bp, Homo sapiens
ctgtgacaaaatttc

SEQ ID NO: 178800 - DNA, 15 bp, Homo sapiens
tgtgacaaaatttca

SEQ ID NO: 178801 - DNA, 15 bp, Homo sapiens
gtgacaaaatttcat

SEQ ID NO: 178802 - DNA, 15 bp, Homo sapiens
tgacaaaatttcatg

SEQ ID NO: 178803 - DNA, 15 bp, Homo sapiens
gacaaaatttcatga

SEQ ID NO: 178804 - DNA, 15 bp, Homo sapiens
acaaaatttcatgaa

SEQ ID NO: 178805 - DNA, 15 bp, Homo sapiens
caaaatttcatgaac

SEQ ID NO: 178806 - DNA, 15 bp, Homo sapiens
aaaatttcatgaact

SEQ ID NO: 178807 - DNA, 15 bp, Homo sapiens
aaatttcatgaacta

SEQ ID NO: 178808 - DNA, 15 bp, Homo sapiens
aatttcatgaactac

SEQ ID NO: 178809 - DNA, 15 bp, Homo sapiens
atttcatgaactacg

SEQ ID NO: 178810 - DNA, 15 bp, Homo sapiens
tttcatgaactacga

SEQ ID NO: 178811 - DNA, 15 bp, Homo sapiens
ttcatgaactacgac

SEQ ID NO: 178812 - DNA, 15 bp, Homo sapiens
tcatgaactacgact

SEQ ID NO: 178813 - DNA, 15 bp, Homo sapiens
catgaactacgactc

SEQ ID NO: 178814 - DNA, 15 bp, Homo sapiens
atgaactacgactca

SEQ ID NO: 178815 - DNA, 15 bp, Homo sapiens
tgaactacgactcat

SEQ ID NO: 178816 - DNA, 15 bp, Homo sapiens
gaactacgactcatc

SEQ ID NO: 178817 - DNA, 15 bp, Homo sapiens
aactacgactcatct

SEQ ID NO: 178818 - DNA, 15 bp, Homo sapiens
actacgactcatcta

SEQ ID NO: 178819 - DNA, 15 bp, Homo sapiens
ctacgactcatctac

SEQ ID NO: 178820 - DNA, 15 bp, Homo sapiens
tacgactcatctacc

SEQ ID NO: 178821 - DNA, 15 bp, Homo sapiens
acgactcatctacct

SEQ ID NO: 178822 - DNA, 15 bp, Homo sapiens
cgactcatctaccta

SEQ ID NO: 178823 - DNA, 15 bp, Homo sapiens
gactcatctacctac

SEQ ID NO: 178824 - DNA, 15 bp, Homo sapiens
actcatctacctaca

SEQ ID NO: 178825 - DNA, 15 bp, Homo sapiens
ctcatctacctacac

SEQ ID NO: 178826 - DNA, 15 bp, Homo sapiens
tcatctacctacacc

SEQ ID NO: 178827 - DNA, 15 bp, Homo sapiens
catctacctacacct

SEQ ID NO: 178828 - DNA, 15 bp, Homo sapiens
atctacctacacctg

SEQ ID NO: 178829 - DNA, 15 bp, Homo sapiens
tctacctacacctgt

SEQ ID NO: 178830 - DNA, 15 bp, Homo sapiens
ctacctacacctgtt

SEQ ID NO: 178831 - DNA, 15 bp, Homo sapiens
tacctacacctgttt

SEQ ID NO: 178832 - DNA, 15 bp, Homo sapiens
acctacacctgtttt

SEQ ID NO: 178833 - DNA, 15 bp, Homo sapiens
cctacacctgttttc

SEQ ID NO: 178834 - DNA, 15 bp, Homo sapiens
ctacacctgttttcc

SEQ ID NO: 178835 - DNA, 15 bp, Homo sapiens
tacacctgttttcct

SEQ ID NO: 178836 - DNA, 15 bp, Homo sapiens
acacctgttttccta

SEQ ID NO: 178837 - DNA, 15 bp, Homo sapiens
cacctgttttcctag

SEQ ID NO: 178838 - DNA, 15 bp, Homo sapiens
acctgttttcctagc

SEQ ID NO: 178839 - DNA, 15 bp, Homo sapiens
cctgttttcctagct

SEQ ID NO: 178840 - DNA, 15 bp, Homo sapiens
ctgttttcctagctc

SEQ ID NO: 178841 - DNA, 15 bp, Homo sapiens
tgttttcctagctcc

SEQ ID NO: 178842 - DNA, 15 bp, Homo sapiens
gttttcctagctccc

SEQ ID NO: 178843 - DNA, 15 bp, Homo sapiens
ttttcctagctccca

SEQ ID NO: 178844 - DNA, 15 bp, Homo sapiens
tttcctagctcccaa

SEQ ID NO: 178845 - DNA, 15 bp, Homo sapiens
ttcctagctcccaag

SEQ ID NO: 178846 - DNA, 15 bp, Homo sapiens
tcctagctcccaagc

SEQ ID NO: 178847 - DNA, 15 bp, Homo sapiens
cctagctcccaagcc

SEQ ID NO: 178848 - DNA, 15 bp, Homo sapiens
ctagctcccaagccc

SEQ ID NO: 178849 - DNA, 15 bp, Homo sapiens
tagctcccaagcccc

SEQ ID NO: 178850 - DNA, 15 bp, Homo sapiens
agctcccaagcccca

SEQ ID NO: 178851 - DNA, 15 bp, Homo sapiens
gctcccaagccccac

SEQ ID NO: 178852 - DNA, 15 bp, Homo sapiens
ctcccaagccccact

SEQ ID NO: 178853 - DNA, 15 bp, Homo sapiens
tcccaagccccactt

SEQ ID NO: 178854 - DNA, 15 bp, Homo sapiens
cccaagccccacttt

SEQ ID NO: 178855 - DNA, 15 bp, Homo sapiens
ccaagccccactttt

SEQ ID NO: 178856 - DNA, 15 bp, Homo sapiens
caagccccacttttt

SEQ ID NO: 178857 - DNA, 15 bp, Homo sapiens
aagccccactttttc

SEQ ID NO: 178858 - DNA, 15 bp, Homo sapiens
agccccactttttca

SEQ ID NO: 178859 - DNA, 15 bp, Homo sapiens
gccccactttttcac

SEQ ID NO: 178860 - DNA, 15 bp, Homo sapiens
ccccactttttcacc

SEQ ID NO: 178861 - DNA, 15 bp, Homo sapiens
cccactttttcacct

SEQ ID NO: 178862 - DNA, 15 bp, Homo sapiens
ccactttttcacctg

SEQ ID NO: 178863 - DNA, 15 bp, Homo sapiens
cactttttcacctgt

SEQ ID NO: 178864 - DNA, 15 bp, Homo sapiens
actttttcacctgta

SEQ ID NO: 178865 - DNA, 15 bp, Homo sapiens
ctttttcacctgtat

SEQ ID NO: 178866 - DNA, 15 bp, Homo sapiens
tttttcacctgtatt

SEQ ID NO: 178867 - DNA, 15 bp, Homo sapiens
ttttcacctgtattg

SEQ ID NO: 178868 - DNA, 15 bp, Homo sapiens
tttcacctgtattga

SEQ ID NO: 178869 - DNA, 15 bp, Homo sapiens
ttcacctgtattgac

SEQ ID NO: 178870 - DNA, 15 bp, Homo sapiens
tcacctgtattgacc

SEQ ID NO: 178871 - DNA, 15 bp, Homo sapiens
cacctgtattgacca

SEQ ID NO: 178872 - DNA, 15 bp, Homo sapiens
acctgtattgaccat

SEQ ID NO: 178873 - DNA, 15 bp, Homo sapiens
cctgtattgaccatg

SEQ ID NO: 178874 - DNA, 15 bp, Homo sapiens
ctgtattgaccatgt

SEQ ID NO: 178875 - DNA, 15 bp, Homo sapiens
tgtattgaccatgtc

SEQ ID NO: 178876 - DNA, 15 bp, Homo sapiens
gtattgaccatgtca

SEQ ID NO: 178877 - DNA, 15 bp, Homo sapiens
tattgaccatgtcaa

SEQ ID NO: 178878 - DNA, 15 bp, Homo sapiens
attgaccatgtcaac

SEQ ID NO: 178879 - DNA, 15 bp, Homo sapiens
ttgaccatgtcaact

SEQ ID NO: 178880 - DNA, 15 bp, Homo sapiens
tgaccatgtcaactt

SEQ ID NO: 178881 - DNA, 15 bp, Homo sapiens
gaccatgtcaacttt

SEQ ID NO: 178882 - DNA, 15 bp, Homo sapiens
accatgtcaactttt

SEQ ID NO: 178883 - DNA, 15 bp, Homo sapiens
ccatgtcaacttttg

SEQ ID NO: 178884 - DNA, 15 bp, Homo sapiens
catgtcaacttttgt

SEQ ID NO: 178885 - DNA, 15 bp, Homo sapiens
atgtcaacttttgtt

SEQ ID NO: 178886 - DNA, 15 bp, Homo sapiens
tgtcaacttttgtta

SEQ ID NO: 178887 - DNA, 15 bp, Homo sapiens
gtcaacttttgttag

SEQ ID NO: 178888 - DNA, 15 bp, Homo sapiens
tcaacttttgttagg

SEQ ID NO: 178889 - DNA, 15 bp, Homo sapiens
caacttttgttaggc

SEQ ID NO: 178890 - DNA, 15 bp, Homo sapiens
aacttttgttaggca

SEQ ID NO: 178891 - DNA, 15 bp, Homo sapiens
acttttgttaggcat

SEQ ID NO: 178892 - DNA, 15 bp, Homo sapiens
cttttgttaggcatc

SEQ ID NO: 178893 - DNA, 15 bp, Homo sapiens
ttttgttaggcatcc

SEQ ID NO: 178894 - DNA, 15 bp, Homo sapiens
tttgttaggcatccg

SEQ ID NO: 178895 - DNA, 15 bp, Homo sapiens
ttgttaggcatccgt

SEQ ID NO: 178896 - DNA, 15 bp, Homo sapiens
tgttaggcatccgtt

SEQ ID NO: 178897 - DNA, 15 bp, Homo sapiens
gttaggcatccgtta

SEQ ID NO: 178898 - DNA, 15 bp, Homo sapiens
ttaggcatccgttag

SEQ ID NO: 178899 - DNA, 15 bp, Homo sapiens
taggcatccgttaga

SEQ ID NO: 178900 - DNA, 15 bp, Homo sapiens
aggcatccgttagat

SEQ ID NO: 178901 - DNA, 15 bp, Homo sapiens
ggcatccgttagatt

SEQ ID NO: 178902 - DNA, 15 bp, Homo sapiens
gcatccgttagattt

SEQ ID NO: 178903 - DNA, 15 bp, Homo sapiens
catccgttagatttc

SEQ ID NO: 178904 - DNA, 15 bp, Homo sapiens
atccgttagatttca

SEQ ID NO: 178905 - DNA, 15 bp, Homo sapiens
tccgttagatttcaa

SEQ ID NO: 178906 - DNA, 15 bp, Homo sapiens
ccgttagatttcaat

SEQ ID NO: 178907 - DNA, 15 bp, Homo sapiens
cgttagatttcaata

SEQ ID NO: 178908 - DNA, 15 bp, Homo sapiens
gttagatttcaatat

SEQ ID NO: 178909 - DNA, 15 bp, Homo sapiens
ttagatttcaatatg

SEQ ID NO: 178910 - DNA, 15 bp, Homo sapiens
tagatttcaatatgg

SEQ ID NO: 178911 - DNA, 15 bp, Homo sapiens
agatttcaatatgga

SEQ ID NO: 178912 - DNA, 15 bp, Homo sapiens
gatttcaatatggaa

SEQ ID NO: 178913 - DNA, 15 bp, Homo sapiens
atttcaatatggaaa

SEQ ID NO: 178914 - DNA, 15 bp, Homo sapiens
tttcaatatggaaaa

SEQ ID NO: 178915 - DNA, 15 bp, Homo sapiens
ttcaatatggaaaaa

SEQ ID NO: 178916 - DNA, 15 bp, Homo sapiens
tcaatatggaaaaat

SEQ ID NO: 178917 - DNA, 15 bp, Homo sapiens
caatatggaaaaata

SEQ ID NO: 178918 - DNA, 15 bp, Homo sapiens
aatatggaaaaatac

SEQ ID NO: 178919 - DNA, 15 bp, Homo sapiens
atatggaaaaatact

SEQ ID NO: 178920 - DNA, 15 bp, Homo sapiens
tatggaaaaatactt

SEQ ID NO: 178921 - DNA, 15 bp, Homo sapiens
atggaaaaatacttc

SEQ ID NO: 178922 - DNA, 15 bp, Homo sapiens
tggaaaaatacttca

SEQ ID NO: 178923 - DNA, 15 bp, Homo sapiens
ggaaaaatacttcat

SEQ ID NO: 178924 - DNA, 15 bp, Homo sapiens
gaaaaatacttcatt

SEQ ID NO: 178925 - DNA, 15 bp, Homo sapiens
aaaaatacttcattt

SEQ ID NO: 178926 - DNA, 15 bp, Homo sapiens
aaaatacttcatttt

SEQ ID NO: 178927 - DNA, 15 bp, Homo sapiens
aaatacttcattttt

SEQ ID NO: 178928 - DNA, 15 bp, Homo sapiens
aatacttcatttttt

SEQ ID NO: 178929 - DNA, 15 bp, Homo sapiens
atacttcattttttg

SEQ ID NO: 178930 - DNA, 15 bp, Homo sapiens
tacttcattttttgt

SEQ ID NO: 178931 - DNA, 15 bp, Homo sapiens
acttcattttttgtt

SEQ ID NO: 178932 - DNA, 15 bp, Homo sapiens
cttcattttttgttt

SEQ ID NO: 178933 - DNA, 15 bp, Homo sapiens
ttcattttttgtttt

SEQ ID NO: 178934 - DNA, 15 bp, Homo sapiens
tcattttttgtttta

SEQ ID NO: 178935 - DNA, 15 bp, Homo sapiens
cattttttgttttaa

SEQ ID NO: 178936 - DNA, 15 bp, Homo sapiens
attttttgttttaag

SEQ ID NO: 178937 - DNA, 15 bp, Homo sapiens
ttttttgttttaagg

SEQ ID NO: 178938 - DNA, 15 bp, Homo sapiens
tttttgttttaagga

SEQ ID NO: 178939 - DNA, 15 bp, Homo sapiens
ttttgttttaaggat

SEQ ID NO: 178940 - DNA, 15 bp, Homo sapiens
tttgttttaaggata

SEQ ID NO: 178941 - DNA, 15 bp, Homo sapiens
ttgttttaaggataa

SEQ ID NO: 178942 - DNA, 15 bp, Homo sapiens
tgttttaaggataag

SEQ ID NO: 178943 - DNA, 15 bp, Homo sapiens
gttttaaggataagc

SEQ ID NO: 178944 - DNA, 15 bp, Homo sapiens
ttttaaggataagca

SEQ ID NO: 178945 - DNA, 15 bp, Homo sapiens
tttaaggataagcaa

SEQ ID NO: 178946 - DNA, 15 bp, Homo sapiens
ttaaggataagcaat

SEQ ID NO: 178947 - DNA, 15 bp, Homo sapiens
taaggataagcaatg

SEQ ID NO: 178948 - DNA, 15 bp, Homo sapiens
aaggataagcaatgt

SEQ ID NO: 178949 - DNA, 15 bp, Homo sapiens
aggataagcaatgtt

SEQ ID NO: 178950 - DNA, 15 bp, Homo sapiens
ggataagcaatgttt

SEQ ID NO: 178951 - DNA, 15 bp, Homo sapiens
gataagcaatgttta

SEQ ID NO: 178952 - DNA, 15 bp, Homo sapiens
ataagcaatgtttaa

SEQ ID NO: 178953 - DNA, 15 bp, Homo sapiens
taagcaatgtttaag

SEQ ID NO: 178954 - DNA, 15 bp, Homo sapiens
aagcaatgtttaagg

SEQ ID NO: 178955 - DNA, 15 bp, Homo sapiens
agcaatgtttaagga

SEQ ID NO: 178956 - DNA, 15 bp, Homo sapiens
gcaatgtttaaggat

SEQ ID NO: 178957 - DNA, 15 bp, Homo sapiens
caatgtttaaggata

SEQ ID NO: 178958 - DNA, 15 bp, Homo sapiens
aatgtttaaggataa

SEQ ID NO: 178959 - DNA, 15 bp, Homo sapiens
atgtttaaggataag

SEQ ID NO: 178960 - DNA, 15 bp, Homo sapiens
tgtttaaggataagc

SEQ ID NO: 178961 - DNA, 15 bp, Homo sapiens
gtttaaggataagct

SEQ ID NO: 178962 - DNA, 15 bp, Homo sapiens
tttaaggataagctc

SEQ ID NO: 178963 - DNA, 15 bp, Homo sapiens
ttaaggataagctca

SEQ ID NO: 178964 - DNA, 15 bp, Homo sapiens
taaggataagctcaa

SEQ ID NO: 178965 - DNA, 15 bp, Homo sapiens
aaggataagctcaat

SEQ ID NO: 178966 - DNA, 15 bp, Homo sapiens
aggataagctcaatg

SEQ ID NO: 178967 - DNA, 15 bp, Homo sapiens
ggataagctcaatgt

SEQ ID NO: 178968 - DNA, 15 bp, Homo sapiens
gataagctcaatgtt

SEQ ID NO: 178969 - DNA, 15 bp, Homo sapiens
ataagctcaatgttt

SEQ ID NO: 178970 - DNA, 15 bp, Homo sapiens
taagctcaatgtttt

SEQ ID NO: 178971 - DNA, 15 bp, Homo sapiens
aagctcaatgtttta

SEQ ID NO: 178972 - DNA, 15 bp, Homo sapiens
agctcaatgttttaa

SEQ ID NO: 178973 - DNA, 15 bp, Homo sapiens
gctcaatgttttaag

SEQ ID NO: 178974 - DNA, 15 bp, Homo sapiens
ctcaatgttttaagg

SEQ ID NO: 178975 - DNA, 15 bp, Homo sapiens
tcaatgttttaagga

SEQ ID NO: 178976 - DNA, 15 bp, Homo sapiens
caatgttttaaggat

SEQ ID NO: 178977 - DNA, 15 bp, Homo sapiens
aatgttttaaggata

SEQ ID NO: 178978 - DNA, 15 bp, Homo sapiens
atgttttaaggataa

SEQ ID NO: 178979 - DNA, 15 bp, Homo sapiens
ttaaggataagcaaa

SEQ ID NO: 178980 - DNA, 15 bp, Homo sapiens
taaggataagcaaag

SEQ ID NO: 178981 - DNA, 15 bp, Homo sapiens
aaggataagcaaaga

SEQ ID NO: 178982 - DNA, 15 bp, Homo sapiens
aggataagcaaagag

SEQ ID NO: 178983 - DNA, 15 bp, Homo sapiens
ggataagcaaagagc

SEQ ID NO: 178984 - DNA, 15 bp, Homo sapiens
gataagcaaagagct

SEQ ID NO: 178985 - DNA, 15 bp, Homo sapiens
ataagcaaagagctc

SEQ ID NO: 178986 - DNA, 15 bp, Homo sapiens
taagcaaagagctct

SEQ ID NO: 178987 - DNA, 15 bp, Homo sapiens
aagcaaagagctcta

SEQ ID NO: 178988 - DNA, 15 bp, Homo sapiens
agcaaagagctctag

SEQ ID NO: 178989 - DNA, 15 bp, Homo sapiens
gcaaagagctctaga

SEQ ID NO: 178990 - DNA, 15 bp, Homo sapiens
caaagagctctagaa

SEQ ID NO: 178991 - DNA, 15 bp, Homo sapiens
aaagagctctagaac

SEQ ID NO: 178992 - DNA, 15 bp, Homo sapiens
aagagctctagaact

SEQ ID NO: 178993 - DNA, 15 bp, Homo sapiens
agagctctagaactc

SEQ ID NO: 178994 - DNA, 15 bp, Homo sapiens
gagctctagaactct

SEQ ID NO: 178995 - DNA, 15 bp, Homo sapiens
agctctagaactcta

SEQ ID NO: 178996 - DNA, 15 bp, Homo sapiens
gctctagaactctaa

SEQ ID NO: 178997 - DNA, 15 bp, Homo sapiens
ctctagaactctaat

SEQ ID NO: 178998 - DNA, 15 bp, Homo sapiens
tctagaactctaatt

SEQ ID NO: 178999 - DNA, 15 bp, Homo sapiens
ctagaactctaattc

SEQ ID NO: 179000 - DNA, 15 bp, Homo sapiens
tagaactctaattct

SEQ ID NO: 179001 - DNA, 15 bp, Homo sapiens
agaactctaattctc

SEQ ID NO: 179002 - DNA, 15 bp, Homo sapiens
gaactctaattctct

SEQ ID NO: 179003 - DNA, 15 bp, Homo sapiens
aactctaattctctt

SEQ ID NO: 179004 - DNA, 15 bp, Homo sapiens
actctaattctcttt

SEQ ID NO: 179005 - DNA, 15 bp, Homo sapiens
ctctaattctctttt

SEQ ID NO: 179006 - DNA, 15 bp, Homo sapiens
tctaattctcttttt

SEQ ID NO: 179007 - DNA, 15 bp, Homo sapiens
ctaattctctttttt

SEQ ID NO: 179008 - DNA, 15 bp, Homo sapiens
taattctcttttttt

SEQ ID NO: 179009 - DNA, 15 bp, Homo sapiens
aattctctttttttt

SEQ ID NO: 179010 - DNA, 15 bp, Homo sapiens
attctcttttttttt

SEQ ID NO: 179011 - DNA, 15 bp, Homo sapiens
ctcgctctgtcgccc

SEQ ID NO: 179012 - DNA, 15 bp, Homo sapiens
tcgctctgtcgccca

SEQ ID NO: 179013 - DNA, 15 bp, Homo sapiens
cgctctgtcgcccag

SEQ ID NO: 179014 - DNA, 15 bp, Homo sapiens
gtgcagtggcgagat

SEQ ID NO: 179015 - DNA, 15 bp, Homo sapiens
tgcagtggcgagatc

SEQ ID NO: 179016 - DNA, 15 bp, Homo sapiens
gcagtggcgagatct

SEQ ID NO: 179017 - DNA, 15 bp, Homo sapiens
cagtggcgagatctc

SEQ ID NO: 179018 - DNA, 15 bp, Homo sapiens
agtggcgagatctcg

SEQ ID NO: 179019 - DNA, 15 bp, Homo sapiens
gtggcgagatctcgg

SEQ ID NO: 179020 - DNA, 15 bp, Homo sapiens
tggcgagatctcggc

SEQ ID NO: 179021 - DNA, 15 bp, Homo sapiens
ggcgagatctcggct

SEQ ID NO: 179022 - DNA, 15 bp, Homo sapiens
gcgagatctcggctc

SEQ ID NO: 179023 - DNA, 15 bp, Homo sapiens
cgagatctcggctca

SEQ ID NO: 179024 - DNA, 15 bp, Homo sapiens
gagatctcggctcac

SEQ ID NO: 179025 - DNA, 15 bp, Homo sapiens
agatctcggctcact

SEQ ID NO: 179026 - DNA, 15 bp, Homo sapiens
atctcggctcactgg

SEQ ID NO: 179027 - DNA, 15 bp, Homo sapiens
tctcggctcactgga

SEQ ID NO: 179028 - DNA, 15 bp, Homo sapiens
ctcggctcactggaa

SEQ ID NO: 179029 - DNA, 15 bp, Homo sapiens
tcggctcactggaag

SEQ ID NO: 179030 - DNA, 15 bp, Homo sapiens
cggctcactggaagc

SEQ ID NO: 179031 - DNA, 15 bp, Homo sapiens
ggctcactggaagct

SEQ ID NO: 179032 - DNA, 15 bp, Homo sapiens
gctcactggaagctc

SEQ ID NO: 179033 - DNA, 15 bp, Homo sapiens
ctcactggaagctcc

SEQ ID NO: 179034 - DNA, 15 bp, Homo sapiens
tcactggaagctccg

SEQ ID NO: 179035 - DNA, 15 bp, Homo sapiens
cactggaagctccgc

SEQ ID NO: 179036 - DNA, 15 bp, Homo sapiens
actggaagctccgcc

SEQ ID NO: 179037 - DNA, 15 bp, Homo sapiens
ctggaagctccgcct

SEQ ID NO: 179038 - DNA, 15 bp, Homo sapiens
tggaagctccgcctt

SEQ ID NO: 179039 - DNA, 15 bp, Homo sapiens
ggaagctccgccttc

SEQ ID NO: 179040 - DNA, 15 bp, Homo sapiens
gaagctccgccttct

SEQ ID NO: 179041 - DNA, 15 bp, Homo sapiens
aagctccgccttctg

SEQ ID NO: 179042 - DNA, 15 bp, Homo sapiens
agctccgccttctgg

SEQ ID NO: 179043 - DNA, 15 bp, Homo sapiens
gctccgccttctggg

SEQ ID NO: 179044 - DNA, 15 bp, Homo sapiens
ctccgccttctgggt

SEQ ID NO: 179045 - DNA, 15 bp, Homo sapiens
tccgccttctgggtt

SEQ ID NO: 179046 - DNA, 15 bp, Homo sapiens
ccgccttctgggttc

SEQ ID NO: 179047 - DNA, 15 bp, Homo sapiens
cgccttctgggttca

SEQ ID NO: 179048 - DNA, 15 bp, Homo sapiens
gccttctgggttcac

SEQ ID NO: 179049 - DNA, 15 bp, Homo sapiens
ccttctgggttcacg

SEQ ID NO: 179050 - DNA, 15 bp, Homo sapiens
cttctgggttcacgc

SEQ ID NO: 179051 - DNA, 15 bp, Homo sapiens
ttctgggttcacgcc

SEQ ID NO: 179052 - DNA, 15 bp, Homo sapiens
tctgggttcacgcca

SEQ ID NO: 179053 - DNA, 15 bp, Homo sapiens
ctgggttcacgccat

SEQ ID NO: 179054 - DNA, 15 bp, Homo sapiens
tgggttcacgccatt

SEQ ID NO: 179055 - DNA, 15 bp, Homo sapiens
ggttcacgccattcc

SEQ ID NO: 179056 - DNA, 15 bp, Homo sapiens
gttcacgccattccc

SEQ ID NO: 179057 - DNA, 15 bp, Homo sapiens
ttcacgccattcccc

SEQ ID NO: 179058 - DNA, 15 bp, Homo sapiens
tcacgccattcccct

SEQ ID NO: 179059 - DNA, 15 bp, Homo sapiens
cacgccattcccctg

SEQ ID NO: 179060 - DNA, 15 bp, Homo sapiens
acgccattcccctgc

SEQ ID NO: 179061 - DNA, 15 bp, Homo sapiens
cgccattcccctgcc

SEQ ID NO: 179062 - DNA, 15 bp, Homo sapiens
gccattcccctgcct

SEQ ID NO: 179063 - DNA, 15 bp, Homo sapiens
ccattcccctgcctc

SEQ ID NO: 179064 - DNA, 15 bp, Homo sapiens
cattcccctgcctca

SEQ ID NO: 179065 - DNA, 15 bp, Homo sapiens
attcccctgcctcag

SEQ ID NO: 179066 - DNA, 15 bp, Homo sapiens
ttcccctgcctcagc

SEQ ID NO: 179067 - DNA, 15 bp, Homo sapiens
tcccctgcctcagcc

SEQ ID NO: 179068 - DNA, 15 bp, Homo sapiens
cccctgcctcagcct

SEQ ID NO: 179069 - DNA, 15 bp, Homo sapiens
ccctgcctcagcctc

SEQ ID NO: 179070 - DNA, 15 bp, Homo sapiens
cctagtagctgggac

SEQ ID NO: 179071 - DNA, 15 bp, Homo sapiens
ctagtagctgggact

SEQ ID NO: 179072 - DNA, 15 bp, Homo sapiens
tagtagctgggacta

SEQ ID NO: 179073 - DNA, 15 bp, Homo sapiens
tgggactacaggcat

SEQ ID NO: 179074 - DNA, 15 bp, Homo sapiens
gggactacaggcatg

SEQ ID NO: 179075 - DNA, 15 bp, Homo sapiens
ggactacaggcatgc

SEQ ID NO: 179076 - DNA, 15 bp, Homo sapiens
gactacaggcatgca

SEQ ID NO: 179077 - DNA, 15 bp, Homo sapiens
tgcaccaccacaccc

SEQ ID NO: 179078 - DNA, 15 bp, Homo sapiens
gcaccaccacaccca

SEQ ID NO: 179079 - DNA, 15 bp, Homo sapiens
caccaccacacccag

SEQ ID NO: 179080 - DNA, 15 bp, Homo sapiens
accaccacacccagc

SEQ ID NO: 179081 - DNA, 15 bp, Homo sapiens
atttttgtatttttg

SEQ ID NO: 179082 - DNA, 15 bp, Homo sapiens
tttttgtatttttgg

SEQ ID NO: 179083 - DNA, 15 bp, Homo sapiens
ttttgtatttttggt

SEQ ID NO: 179084 - DNA, 15 bp, Homo sapiens
tttgtatttttggta

SEQ ID NO: 179085 - DNA, 15 bp, Homo sapiens
ttgtatttttggtag

SEQ ID NO: 179086 - DNA, 15 bp, Homo sapiens
tgtatttttggtaga

SEQ ID NO: 179087 - DNA, 15 bp, Homo sapiens
gtatttttggtagag

SEQ ID NO: 179088 - DNA, 15 bp, Homo sapiens
tatttttggtagaga

SEQ ID NO: 179089 - DNA, 15 bp, Homo sapiens
atttttggtagagat

SEQ ID NO: 179090 - DNA, 15 bp, Homo sapiens
tttttggtagagatg

SEQ ID NO: 179091 - DNA, 15 bp, Homo sapiens
ttttggtagagatgg

SEQ ID NO: 179092 - DNA, 15 bp, Homo sapiens
tttggtagagatggg

SEQ ID NO: 179093 - DNA, 15 bp, Homo sapiens
ttggtagagatgggg

SEQ ID NO: 179094 - DNA, 15 bp, Homo sapiens
tggtagagatggggc

SEQ ID NO: 179095 - DNA, 15 bp, Homo sapiens
ggtagagatggggct

SEQ ID NO: 179096 - DNA, 15 bp, Homo sapiens
gtagagatggggctt

SEQ ID NO: 179097 - DNA, 15 bp, Homo sapiens
tagagatggggcttc

SEQ ID NO: 179098 - DNA, 15 bp, Homo sapiens
agagatggggcttca

SEQ ID NO: 179099 - DNA, 15 bp, Homo sapiens
gagatggggcttcac

SEQ ID NO: 179100 - DNA, 15 bp, Homo sapiens
agatggggcttcact

SEQ ID NO: 179101 - DNA, 15 bp, Homo sapiens
gatggggcttcacta

SEQ ID NO: 179102 - DNA, 15 bp, Homo sapiens
atggggcttcactac

SEQ ID NO: 179103 - DNA, 15 bp, Homo sapiens
tggggcttcactacg

SEQ ID NO: 179104 - DNA, 15 bp, Homo sapiens
ggggcttcactacgt

SEQ ID NO: 179105 - DNA, 15 bp, Homo sapiens
gggcttcactacgtt

SEQ ID NO: 179106 - DNA, 15 bp, Homo sapiens
ggcttcactacgttg

SEQ ID NO: 179107 - DNA, 15 bp, Homo sapiens
gcttcactacgttga

SEQ ID NO: 179108 - DNA, 15 bp, Homo sapiens
cttcactacgttgac

SEQ ID NO: 179109 - DNA, 15 bp, Homo sapiens
ttcactacgttgacc

SEQ ID NO: 179110 - DNA, 15 bp, Homo sapiens
tcactacgttgacca

SEQ ID NO: 179111 - DNA, 15 bp, Homo sapiens
cactacgttgaccag

SEQ ID NO: 179112 - DNA, 15 bp, Homo sapiens
actacgttgaccagg

SEQ ID NO: 179113 - DNA, 15 bp, Homo sapiens
ctacgttgaccaggc

SEQ ID NO: 179114 - DNA, 15 bp, Homo sapiens
tacgttgaccaggcg

SEQ ID NO: 179115 - DNA, 15 bp, Homo sapiens
acgttgaccaggcgg

SEQ ID NO: 179116 - DNA, 15 bp, Homo sapiens
cgttgaccaggcgga

SEQ ID NO: 179117 - DNA, 15 bp, Homo sapiens
gttgaccaggcggat

SEQ ID NO: 179118 - DNA, 15 bp, Homo sapiens
ttgaccaggcggatc

SEQ ID NO: 179119 - DNA, 15 bp, Homo sapiens
tgaccaggcggatct

SEQ ID NO: 179120 - DNA, 15 bp, Homo sapiens
gaccaggcggatctt

SEQ ID NO: 179121 - DNA, 15 bp, Homo sapiens
accaggcggatcttg

SEQ ID NO: 179122 - DNA, 15 bp, Homo sapiens
ccaggcggatcttga

SEQ ID NO: 179123 - DNA, 15 bp, Homo sapiens
caggcggatcttgaa

SEQ ID NO: 179124 - DNA, 15 bp, Homo sapiens
aggcggatcttgaat

SEQ ID NO: 179125 - DNA, 15 bp, Homo sapiens
ggcggatcttgaatt

SEQ ID NO: 179126 - DNA, 15 bp, Homo sapiens
gcggatcttgaattc

SEQ ID NO: 179127 - DNA, 15 bp, Homo sapiens
cggatcttgaattct

SEQ ID NO: 179128 - DNA, 15 bp, Homo sapiens
ggatcttgaattctt

SEQ ID NO: 179129 - DNA, 15 bp, Homo sapiens
gatcttgaattcttg

SEQ ID NO: 179130 - DNA, 15 bp, Homo sapiens
atcttgaattcttga

SEQ ID NO: 179131 - DNA, 15 bp, Homo sapiens
tcttgaattcttgac

SEQ ID NO: 179132 - DNA, 15 bp, Homo sapiens
cttgaattcttgacc

SEQ ID NO: 179133 - DNA, 15 bp, Homo sapiens
ttgaattcttgacct

SEQ ID NO: 179134 - DNA, 15 bp, Homo sapiens
tgaattcttgacctc

SEQ ID NO: 179135 - DNA, 15 bp, Homo sapiens
gaattcttgacctca

SEQ ID NO: 179136 - DNA, 15 bp, Homo sapiens
aattcttgacctcaa

SEQ ID NO: 179137 - DNA, 15 bp, Homo sapiens
attcttgacctcaag

SEQ ID NO: 179138 - DNA, 15 bp, Homo sapiens
ttcttgacctcaagt

SEQ ID NO: 179139 - DNA, 15 bp, Homo sapiens
tcttgacctcaagtg

SEQ ID NO: 179140 - DNA, 15 bp, Homo sapiens
cttgacctcaagtga

SEQ ID NO: 179141 - DNA, 15 bp, Homo sapiens
ttgacctcaagtgat

SEQ ID NO: 179142 - DNA, 15 bp, Homo sapiens
gacctcaagtgattc

SEQ ID NO: 179143 - DNA, 15 bp, Homo sapiens
acctcaagtgattcg

SEQ ID NO: 179144 - DNA, 15 bp, Homo sapiens
cctcaagtgattcgc

SEQ ID NO: 179145 - DNA, 15 bp, Homo sapiens
ctcaagtgattcgcc

SEQ ID NO: 179146 - DNA, 15 bp, Homo sapiens
tcaagtgattcgccc

SEQ ID NO: 179147 - DNA, 15 bp, Homo sapiens
caagtgattcgcccg

SEQ ID NO: 179148 - DNA, 15 bp, Homo sapiens
aagtgattcgcccgc

SEQ ID NO: 179149 - DNA, 15 bp, Homo sapiens
agtgattcgcccgcc

SEQ ID NO: 179150 - DNA, 15 bp, Homo sapiens
gattcgcccgcctcg

SEQ ID NO: 179151 - DNA, 15 bp, Homo sapiens
attcgcccgcctcgg

SEQ ID NO: 179152 - DNA, 15 bp, Homo sapiens
ttcgcccgcctcggc

SEQ ID NO: 179153 - DNA, 15 bp, Homo sapiens
tcgcccgcctcggcc

SEQ ID NO: 179154 - DNA, 15 bp, Homo sapiens
gcccgcctcggcctt

SEQ ID NO: 179155 - DNA, 15 bp, Homo sapiens
cccgcctcggccttc

SEQ ID NO: 179156 - DNA, 15 bp, Homo sapiens
ccgcctcggccttcc

SEQ ID NO: 179157 - DNA, 15 bp, Homo sapiens
cgcctcggccttcca

SEQ ID NO: 179158 - DNA, 15 bp, Homo sapiens
gcctcggccttccaa

SEQ ID NO: 179159 - DNA, 15 bp, Homo sapiens
cctcggccttccaaa

SEQ ID NO: 179160 - DNA, 15 bp, Homo sapiens
ctcggccttccaaag

SEQ ID NO: 179161 - DNA, 15 bp, Homo sapiens
tcggccttccaaagt

SEQ ID NO: 179162 - DNA, 15 bp, Homo sapiens
cggccttccaaagtg

SEQ ID NO: 179163 - DNA, 15 bp, Homo sapiens
cttccaaagtgctga

SEQ ID NO: 179164 - DNA, 15 bp, Homo sapiens
ttccaaagtgctgag

SEQ ID NO: 179165 - DNA, 15 bp, Homo sapiens
tccaaagtgctgaga

SEQ ID NO: 179166 - DNA, 15 bp, Homo sapiens
aagtgctgagattat

SEQ ID NO: 179167 - DNA, 15 bp, Homo sapiens
agtgctgagattata

SEQ ID NO: 179168 - DNA, 15 bp, Homo sapiens
gtgctgagattatag

SEQ ID NO: 179169 - DNA, 15 bp, Homo sapiens
tgctgagattatagg

SEQ ID NO: 179170 - DNA, 15 bp, Homo sapiens
gctgagattataggc

SEQ ID NO: 179171 - DNA, 15 bp, Homo sapiens
ctgagattataggcg

SEQ ID NO: 179172 - DNA, 15 bp, Homo sapiens
tgagattataggcgt

SEQ ID NO: 179173 - DNA, 15 bp, Homo sapiens
gagattataggcgtg

SEQ ID NO: 179174 - DNA, 15 bp, Homo sapiens
agattataggcgtga

SEQ ID NO: 179175 - DNA, 15 bp, Homo sapiens
gagccaccgcgccca

SEQ ID NO: 179176 - DNA, 15 bp, Homo sapiens
agccaccgcgcccag

SEQ ID NO: 179177 - DNA, 15 bp, Homo sapiens
gccaccgcgcccagt

SEQ ID NO: 179178 - DNA, 15 bp, Homo sapiens
ccaccgcgcccagtc

SEQ ID NO: 179179 - DNA, 15 bp, Homo sapiens
caccgcgcccagtct

SEQ ID NO: 179180 - DNA, 15 bp, Homo sapiens
accgcgcccagtctc

SEQ ID NO: 179181 - DNA, 15 bp, Homo sapiens
ccgcgcccagtctct

SEQ ID NO: 179182 - DNA, 15 bp, Homo sapiens
cgcgcccagtctcta

SEQ ID NO: 179183 - DNA, 15 bp, Homo sapiens
gcgcccagtctctaa

SEQ ID NO: 179184 - DNA, 15 bp, Homo sapiens
cgcccagtctctaat

SEQ ID NO: 179185 - DNA, 15 bp, Homo sapiens
gcccagtctctaatt

SEQ ID NO: 179186 - DNA, 15 bp, Homo sapiens
cccagtctctaattc

SEQ ID NO: 179187 - DNA, 15 bp, Homo sapiens
ccagtctctaattca

SEQ ID NO: 179188 - DNA, 15 bp, Homo sapiens
cagtctctaattcat

SEQ ID NO: 179189 - DNA, 15 bp, Homo sapiens
agtctctaattcatt

SEQ ID NO: 179190 - DNA, 15 bp, Homo sapiens
gtctctaattcattt

SEQ ID NO: 179191 - DNA, 15 bp, Homo sapiens
tctctaattcatttt

SEQ ID NO: 179192 - DNA, 15 bp, Homo sapiens
ctctaattcattttt

SEQ ID NO: 179193 - DNA, 15 bp, Homo sapiens
tctaattcattttta

SEQ ID NO: 179194 - DNA, 15 bp, Homo sapiens
ctaattcatttttat

SEQ ID NO: 179195 - DNA, 15 bp, Homo sapiens
taattcatttttatc

SEQ ID NO: 179196 - DNA, 15 bp, Homo sapiens
aattcatttttatct

SEQ ID NO: 179197 - DNA, 15 bp, Homo sapiens
attcatttttatctc

SEQ ID NO: 179198 - DNA, 15 bp, Homo sapiens
ttcatttttatctcc

SEQ ID NO: 179199 - DNA, 15 bp, Homo sapiens
tcatttttatctcca

SEQ ID NO: 179200 - DNA, 15 bp, Homo sapiens
catttttatctccag

SEQ ID NO: 179201 - DNA, 15 bp, Homo sapiens
atttttatctccaga

SEQ ID NO: 179202 - DNA, 15 bp, Homo sapiens
tttttatctccagac

SEQ ID NO: 179203 - DNA, 15 bp, Homo sapiens
ttttatctccagact

SEQ ID NO: 179204 - DNA, 15 bp, Homo sapiens
tttatctccagactc

SEQ ID NO: 179205 - DNA, 15 bp, Homo sapiens
ttatctccagactca

SEQ ID NO: 179206 - DNA, 15 bp, Homo sapiens
tatctccagactcat

SEQ ID NO: 179207 - DNA, 15 bp, Homo sapiens
atctccagactcatc

SEQ ID NO: 179208 - DNA, 15 bp, Homo sapiens
tctccagactcatca

SEQ ID NO: 179209 - DNA, 15 bp, Homo sapiens
ctccagactcatcat

SEQ ID NO: 179210 - DNA, 15 bp, Homo sapiens
tccagactcatcata

SEQ ID NO: 179211 - DNA, 15 bp, Homo sapiens
ccagactcatcatat

SEQ ID NO: 179212 - DNA, 15 bp, Homo sapiens
cagactcatcatata

SEQ ID NO: 179213 - DNA, 15 bp, Homo sapiens
agactcatcatatat

SEQ ID NO: 179214 - DNA, 15 bp, Homo sapiens
gactcatcatatatt

SEQ ID NO: 179215 - DNA, 15 bp, Homo sapiens
actcatcatatatta

SEQ ID NO: 179216 - DNA, 15 bp, Homo sapiens
ctcatcatatattat

SEQ ID NO: 179217 - DNA, 15 bp, Homo sapiens
tcatcatatattatt

SEQ ID NO: 179218 - DNA, 15 bp, Homo sapiens
catcatatattatta

SEQ ID NO: 179219 - DNA, 15 bp, Homo sapiens
atcatatattattat

SEQ ID NO: 179220 - DNA, 15 bp, Homo sapiens
tcatatattattata

SEQ ID NO: 179221 - DNA, 15 bp, Homo sapiens
catatattattatat

SEQ ID NO: 179222 - DNA, 15 bp, Homo sapiens
atatattattatata

SEQ ID NO: 179223 - DNA, 15 bp, Homo sapiens
tatattattatataa

SEQ ID NO: 179224 - DNA, 15 bp, Homo sapiens
atattattatataaa

SEQ ID NO: 179225 - DNA, 15 bp, Homo sapiens
tattattatataaaa

SEQ ID NO: 179226 - DNA, 15 bp, Homo sapiens
attattatataaaac

SEQ ID NO: 179227 - DNA, 15 bp, Homo sapiens
ttattatataaaaca

SEQ ID NO: 179228 - DNA, 15 bp, Homo sapiens
tattatataaaacaa

SEQ ID NO: 179229 - DNA, 15 bp, Homo sapiens
attatataaaacaaa

SEQ ID NO: 179230 - DNA, 15 bp, Homo sapiens
ttatataaaacaaag

SEQ ID NO: 179231 - DNA, 15 bp, Homo sapiens
tatataaaacaaaga

SEQ ID NO: 179232 - DNA, 15 bp, Homo sapiens
atataaaacaaagaa

SEQ ID NO: 179233 - DNA, 15 bp, Homo sapiens
tataaaacaaagaat

SEQ ID NO: 179234 - DNA, 15 bp, Homo sapiens
ataaaacaaagaatt

SEQ ID NO: 179235 - DNA, 15 bp, Homo sapiens
taaaacaaagaatta

SEQ ID NO: 179236 - DNA, 15 bp, Homo sapiens
aaaacaaagaattat

SEQ ID NO: 179237 - DNA, 15 bp, Homo sapiens
aaacaaagaattata

SEQ ID NO: 179238 - DNA, 15 bp, Homo sapiens
aacaaagaattatat

SEQ ID NO: 179239 - DNA, 15 bp, Homo sapiens
acaaagaattatata

SEQ ID NO: 179240 - DNA, 15 bp, Homo sapiens
caaagaattatatat

SEQ ID NO: 179241 - DNA, 15 bp, Homo sapiens
aaagaattatatatt

SEQ ID NO: 179242 - DNA, 15 bp, Homo sapiens
aagaattatatattt

SEQ ID NO: 179243 - DNA, 15 bp, Homo sapiens
agaattatatatttt

SEQ ID NO: 179244 - DNA, 15 bp, Homo sapiens
gaattatatattttt

SEQ ID NO: 179245 - DNA, 15 bp, Homo sapiens
aattatatatttttt

SEQ ID NO: 179246 - DNA, 15 bp, Homo sapiens
attatatattttttt

SEQ ID NO: 179247 - DNA, 15 bp, Homo sapiens
ttatatatttttttc

SEQ ID NO: 179248 - DNA, 15 bp, Homo sapiens
tatatatttttttcc

SEQ ID NO: 179249 - DNA, 15 bp, Homo sapiens
atatatttttttcct

SEQ ID NO: 179250 - DNA, 15 bp, Homo sapiens
tatatttttttccta

SEQ ID NO: 179251 - DNA, 15 bp, Homo sapiens
atatttttttcctat

SEQ ID NO: 179252 - DNA, 15 bp, Homo sapiens
tatttttttcctata

SEQ ID NO: 179253 - DNA, 15 bp, Homo sapiens
atttttttcctatag

SEQ ID NO: 179254 - DNA, 15 bp, Homo sapiens
tttttttcctataga

SEQ ID NO: 179255 - DNA, 15 bp, Homo sapiens
ttttttcctatagaa

SEQ ID NO: 179256 - DNA, 15 bp, Homo sapiens
tttttcctatagaac

SEQ ID NO: 179257 - DNA, 15 bp, Homo sapiens
ttttcctatagaact

SEQ ID NO: 179258 - DNA, 15 bp, Homo sapiens
tttcctatagaactt

SEQ ID NO: 179259 - DNA, 15 bp, Homo sapiens
ttcctatagaacttt

SEQ ID NO: 179260 - DNA, 15 bp, Homo sapiens
tcctatagaacttta

SEQ ID NO: 179261 - DNA, 15 bp, Homo sapiens
cctatagaactttac

SEQ ID NO: 179262 - DNA, 15 bp, Homo sapiens
ctatagaactttact

SEQ ID NO: 179263 - DNA, 15 bp, Homo sapiens
tatagaactttactc

SEQ ID NO: 179264 - DNA, 15 bp, Homo sapiens
atagaactttactct

SEQ ID NO: 179265 - DNA, 15 bp, Homo sapiens
tagaactttactctt

SEQ ID NO: 179266 - DNA, 15 bp, Homo sapiens
agaactttactcttt

SEQ ID NO: 179267 - DNA, 15 bp, Homo sapiens
gaactttactcttta

SEQ ID NO: 179268 - DNA, 15 bp, Homo sapiens
aactttactctttat

SEQ ID NO: 179269 - DNA, 15 bp, Homo sapiens
actttactctttata

SEQ ID NO: 179270 - DNA, 15 bp, Homo sapiens
ctttactctttataa

SEQ ID NO: 179271 - DNA, 15 bp, Homo sapiens
tttactctttataac

SEQ ID NO: 179272 - DNA, 15 bp, Homo sapiens
ttactctttataact

SEQ ID NO: 179273 - DNA, 15 bp, Homo sapiens
tactctttataactt

SEQ ID NO: 179274 - DNA, 15 bp, Homo sapiens
actctttataacttt

SEQ ID NO: 179275 - DNA, 15 bp, Homo sapiens
ctctttataacttta

SEQ ID NO: 179276 - DNA, 15 bp, Homo sapiens
tctttataactttag

SEQ ID NO: 179277 - DNA, 15 bp, Homo sapiens
ctttataactttagg

SEQ ID NO: 179278 - DNA, 15 bp, Homo sapiens
tttataactttaggt

SEQ ID NO: 179279 - DNA, 15 bp, Homo sapiens
ttataactttaggtc

SEQ ID NO: 179280 - DNA, 15 bp, Homo sapiens
tataactttaggtct

SEQ ID NO: 179281 - DNA, 15 bp, Homo sapiens
ataactttaggtctt

SEQ ID NO: 179282 - DNA, 15 bp, Homo sapiens
taactttaggtcttt

SEQ ID NO: 179283 - DNA, 15 bp, Homo sapiens
aactttaggtcttta

SEQ ID NO: 179284 - DNA, 15 bp, Homo sapiens
actttaggtctttag

SEQ ID NO: 179285 - DNA, 15 bp, Homo sapiens
ctttaggtctttagt

SEQ ID NO: 179286 - DNA, 15 bp, Homo sapiens
tttaggtctttagta

SEQ ID NO: 179287 - DNA, 15 bp, Homo sapiens
ttaggtctttagtat

SEQ ID NO: 179288 - DNA, 15 bp, Homo sapiens
taggtctttagtatt

SEQ ID NO: 179289 - DNA, 15 bp, Homo sapiens
aggtctttagtattt

SEQ ID NO: 179290 - DNA, 15 bp, Homo sapiens
ggtctttagtatttt

SEQ ID NO: 179291 - DNA, 15 bp, Homo sapiens
gtctttagtatttta

SEQ ID NO: 179292 - DNA, 15 bp, Homo sapiens
tctttagtattttac

SEQ ID NO: 179293 - DNA, 15 bp, Homo sapiens
ctttagtattttact

SEQ ID NO: 179294 - DNA, 15 bp, Homo sapiens
tttagtattttactc

SEQ ID NO: 179295 - DNA, 15 bp, Homo sapiens
ttagtattttactca

SEQ ID NO: 179296 - DNA, 15 bp, Homo sapiens
tagtattttactcat

SEQ ID NO: 179297 - DNA, 15 bp, Homo sapiens
agtattttactcatt

SEQ ID NO: 179298 - DNA, 15 bp, Homo sapiens
gtattttactcatta

SEQ ID NO: 179299 - DNA, 15 bp, Homo sapiens
tattttactcattaa

SEQ ID NO: 179300 - DNA, 15 bp, Homo sapiens
attttactcattaaa

SEQ ID NO: 179301 - DNA, 15 bp, Homo sapiens
ttttactcattaaaa

SEQ ID NO: 179302 - DNA, 15 bp, Homo sapiens
tttactcattaaaac

SEQ ID NO: 179303 - DNA, 15 bp, Homo sapiens
ttactcattaaaact

SEQ ID NO: 179304 - DNA, 15 bp, Homo sapiens
tactcattaaaactc

SEQ ID NO: 179305 - DNA, 15 bp, Homo sapiens
actcattaaaactca

SEQ ID NO: 179306 - DNA, 15 bp, Homo sapiens
ctcattaaaactcat

SEQ ID NO: 179307 - DNA, 15 bp, Homo sapiens
tcattaaaactcata

SEQ ID NO: 179308 - DNA, 15 bp, Homo sapiens
cattaaaactcatag

SEQ ID NO: 179309 - DNA, 15 bp, Homo sapiens
attaaaactcatagt

SEQ ID NO: 179310 - DNA, 15 bp, Homo sapiens
ttaaaactcatagtc

SEQ ID NO: 179311 - DNA, 15 bp, Homo sapiens
taaaactcatagtct

SEQ ID NO: 179312 - DNA, 15 bp, Homo sapiens
aaaactcatagtcta

SEQ ID NO: 179313 - DNA, 15 bp, Homo sapiens
aaactcatagtctaa

SEQ ID NO: 179314 - DNA, 15 bp, Homo sapiens
aactcatagtctaag

SEQ ID NO: 179315 - DNA, 15 bp, Homo sapiens
actcatagtctaaga

SEQ ID NO: 179316 - DNA, 15 bp, Homo sapiens
ctcatagtctaagag

SEQ ID NO: 179317 - DNA, 15 bp, Homo sapiens
tcatagtctaagagg

SEQ ID NO: 179318 - DNA, 15 bp, Homo sapiens
catagtctaagaggg

SEQ ID NO: 179319 - DNA, 15 bp, Homo sapiens
atagtctaagaggga

SEQ ID NO: 179320 - DNA, 15 bp, Homo sapiens
tagtctaagagggaa

SEQ ID NO: 179321 - DNA, 15 bp, Homo sapiens
agtctaagagggaag

SEQ ID NO: 179322 - DNA, 15 bp, Homo sapiens
gtctaagagggaaga

SEQ ID NO: 179323 - DNA, 15 bp, Homo sapiens
tctaagagggaagaa

SEQ ID NO: 179324 - DNA, 15 bp, Homo sapiens
ctaagagggaagaac

SEQ ID NO: 179325 - DNA, 15 bp, Homo sapiens
taagagggaagaact

SEQ ID NO: 179326 - DNA, 15 bp, Homo sapiens
aagagggaagaactc

SEQ ID NO: 179327 - DNA, 15 bp, Homo sapiens
agagggaagaactca

SEQ ID NO: 179328 - DNA, 15 bp, Homo sapiens
gagggaagaactcac

SEQ ID NO: 179329 - DNA, 15 bp, Homo sapiens
agggaagaactcacc

SEQ ID NO: 179330 - DNA, 15 bp, Homo sapiens
gggaagaactcacct

SEQ ID NO: 179331 - DNA, 15 bp, Homo sapiens
ggaagaactcacctt

SEQ ID NO: 179332 - DNA, 15 bp, Homo sapiens
gaagaactcaccttc

SEQ ID NO: 179333 - DNA, 15 bp, Homo sapiens
aagaactcaccttct

SEQ ID NO: 179334 - DNA, 15 bp, Homo sapiens
agaactcaccttctt

SEQ ID NO: 179335 - DNA, 15 bp, Homo sapiens
gaactcaccttcttt

SEQ ID NO: 179336 - DNA, 15 bp, Homo sapiens
aactcaccttctttt

SEQ ID NO: 179337 - DNA, 15 bp, Homo sapiens
actcaccttcttttg

SEQ ID NO: 179338 - DNA, 15 bp, Homo sapiens
ctcaccttcttttgg

SEQ ID NO: 179339 - DNA, 15 bp, Homo sapiens
tcaccttcttttgga

SEQ ID NO: 179340 - DNA, 15 bp, Homo sapiens
caccttcttttggag

SEQ ID NO: 179341 - DNA, 15 bp, Homo sapiens
accttcttttggagg

SEQ ID NO: 179342 - DNA, 15 bp, Homo sapiens
ccttcttttggaggc

SEQ ID NO: 179343 - DNA, 15 bp, Homo sapiens
cttcttttggaggct

SEQ ID NO: 179344 - DNA, 15 bp, Homo sapiens
ttcttttggaggctt

SEQ ID NO: 179345 - DNA, 15 bp, Homo sapiens
tcttttggaggcttt

SEQ ID NO: 179346 - DNA, 15 bp, Homo sapiens
cttttggaggctttt

SEQ ID NO: 179347 - DNA, 15 bp, Homo sapiens
ttttggaggcttttc

SEQ ID NO: 179348 - DNA, 15 bp, Homo sapiens
gttacaggtgctcta

SEQ ID NO: 179349 - DNA, 15 bp, Homo sapiens
ttacaggtgctctag

SEQ ID NO: 179350 - DNA, 15 bp, Homo sapiens
tacaggtgctctagc

SEQ ID NO: 179351 - DNA, 15 bp, Homo sapiens
acaggtgctctagcc

SEQ ID NO: 179352 - DNA, 15 bp, Homo sapiens
caggtgctctagcct

SEQ ID NO: 179353 - DNA, 15 bp, Homo sapiens
aggtgctctagcctt

SEQ ID NO: 179354 - DNA, 15 bp, Homo sapiens
ggtgctctagccttc

SEQ ID NO: 179355 - DNA, 15 bp, Homo sapiens
gtgctctagccttca

SEQ ID NO: 179356 - DNA, 15 bp, Homo sapiens
tgctctagccttcat

SEQ ID NO: 179357 - DNA, 15 bp, Homo sapiens
gctctagccttcata

SEQ ID NO: 179358 - DNA, 15 bp, Homo sapiens
ctctagccttcatag

SEQ ID NO: 179359 - DNA, 15 bp, Homo sapiens
tctagccttcatagc

SEQ ID NO: 179360 - DNA, 15 bp, Homo sapiens
ctagccttcatagcg

SEQ ID NO: 179361 - DNA, 15 bp, Homo sapiens
tagccttcatagcga

SEQ ID NO: 179362 - DNA, 15 bp, Homo sapiens
agccttcatagcgac

SEQ ID NO: 179363 - DNA, 15 bp, Homo sapiens
gccttcatagcgaca

SEQ ID NO: 179364 - DNA, 15 bp, Homo sapiens
ccttcatagcgacag

SEQ ID NO: 179365 - DNA, 15 bp, Homo sapiens
cttcatagcgacaga

SEQ ID NO: 179366 - DNA, 15 bp, Homo sapiens
ttcatagcgacagaa

SEQ ID NO: 179367 - DNA, 15 bp, Homo sapiens
tcatagcgacagaag

SEQ ID NO: 179368 - DNA, 15 bp, Homo sapiens
catagcgacagaagt

SEQ ID NO: 179369 - DNA, 15 bp, Homo sapiens
atagcgacagaagtg

SEQ ID NO: 179370 - DNA, 15 bp, Homo sapiens
tagcgacagaagtga

SEQ ID NO: 179371 - DNA, 15 bp, Homo sapiens
agcgacagaagtgag

SEQ ID NO: 179372 - DNA, 15 bp, Homo sapiens
gcgacagaagtgagc

SEQ ID NO: 179373 - DNA, 15 bp, Homo sapiens
cgacagaagtgagct

SEQ ID NO: 179374 - DNA, 15 bp, Homo sapiens
gacagaagtgagcta

SEQ ID NO: 179375 - DNA, 15 bp, Homo sapiens
acagaagtgagctac

SEQ ID NO: 179376 - DNA, 15 bp, Homo sapiens
cagaagtgagctacg

SEQ ID NO: 179377 - DNA, 15 bp, Homo sapiens
agaagtgagctacgg

SEQ ID NO: 179378 - DNA, 15 bp, Homo sapiens
gaagtgagctacggc

SEQ ID NO: 179379 - DNA, 15 bp, Homo sapiens
aagtgagctacggct

SEQ ID NO: 179380 - DNA, 15 bp, Homo sapiens
agtgagctacggctc

SEQ ID NO: 179381 - DNA, 15 bp, Homo sapiens
gtgagctacggctcc

SEQ ID NO: 179382 - DNA, 15 bp, Homo sapiens
tgagctacggctcca

SEQ ID NO: 179383 - DNA, 15 bp, Homo sapiens
gagctacggctccag

SEQ ID NO: 179384 - DNA, 15 bp, Homo sapiens
agctacggctccaga

SEQ ID NO: 179385 - DNA, 15 bp, Homo sapiens
gctacggctccagag

SEQ ID NO: 179386 - DNA, 15 bp, Homo sapiens
ctacggctccagagg

SEQ ID NO: 179387 - DNA, 15 bp, Homo sapiens
tacggctccagagga

SEQ ID NO: 179388 - DNA, 15 bp, Homo sapiens
acggctccagaggat

SEQ ID NO: 179389 - DNA, 15 bp, Homo sapiens
cggctccagaggatg

SEQ ID NO: 179390 - DNA, 15 bp, Homo sapiens
ggctccagaggatgc

SEQ ID NO: 179391 - DNA, 15 bp, Homo sapiens
gctccagaggatgca

SEQ ID NO: 179392 - DNA, 15 bp, Homo sapiens
ctccagaggatgcag

SEQ ID NO: 179393 - DNA, 15 bp, Homo sapiens
tccagaggatgcagg

SEQ ID NO: 179394 - DNA, 15 bp, Homo sapiens
ccagaggatgcaggt

SEQ ID NO: 179395 - DNA, 15 bp, Homo sapiens
cagaggatgcaggtg

SEQ ID NO: 179396 - DNA, 15 bp, Homo sapiens
agaggatgcaggtga

SEQ ID NO: 179397 - DNA, 15 bp, Homo sapiens
gaggatgcaggtgac

SEQ ID NO: 179398 - DNA, 15 bp, Homo sapiens
aggatgcaggtgacc

SEQ ID NO: 179399 - DNA, 15 bp, Homo sapiens
ggatgcaggtgacct

SEQ ID NO: 179400 - DNA, 15 bp, Homo sapiens
gatgcaggtgacctc

SEQ ID NO: 179401 - DNA, 15 bp, Homo sapiens
atgcaggtgacctcc

SEQ ID NO: 179402 - DNA, 15 bp, Homo sapiens
tgcaggtgacctccg

SEQ ID NO: 179403 - DNA, 15 bp, Homo sapiens
gcaggtgacctccgg

SEQ ID NO: 179404 - DNA, 15 bp, Homo sapiens
caggtgacctccggt

SEQ ID NO: 179405 - DNA, 15 bp, Homo sapiens
aggtgacctccggtc

SEQ ID NO: 179406 - DNA, 15 bp, Homo sapiens
ggtgacctccggtca

SEQ ID NO: 179407 - DNA, 15 bp, Homo sapiens
gtgacctccggtcag

SEQ ID NO: 179408 - DNA, 15 bp, Homo sapiens
tgacctccggtcagc

SEQ ID NO: 179409 - DNA, 15 bp, Homo sapiens
gacctccggtcagca

SEQ ID NO: 179410 - DNA, 15 bp, Homo sapiens
acctccggtcagcat

SEQ ID NO: 179411 - DNA, 15 bp, Homo sapiens
cctccggtcagcata

SEQ ID NO: 179412 - DNA, 15 bp, Homo sapiens
ctccggtcagcataa

SEQ ID NO: 179413 - DNA, 15 bp, Homo sapiens
tccggtcagcataat

SEQ ID NO: 179414 - DNA, 15 bp, Homo sapiens
ccggtcagcataatg

SEQ ID NO: 179415 - DNA, 15 bp, Homo sapiens
cggtcagcataatga

SEQ ID NO: 179416 - DNA, 15 bp, Homo sapiens
ggtcagcataatgag

SEQ ID NO: 179417 - DNA, 15 bp, Homo sapiens
gtcagcataatgagg

SEQ ID NO: 179418 - DNA, 15 bp, Homo sapiens
tcagcataatgagga

SEQ ID NO: 179419 - DNA, 15 bp, Homo sapiens
cagcataatgaggaa

SEQ ID NO: 179420 - DNA, 15 bp, Homo sapiens
agcataatgaggaaa

SEQ ID NO: 179421 - DNA, 15 bp, Homo sapiens
gcataatgaggaaag

SEQ ID NO: 179422 - DNA, 15 bp, Homo sapiens
cataatgaggaaagg

SEQ ID NO: 179423 - DNA, 15 bp, Homo sapiens
ataatgaggaaagga

SEQ ID NO: 179424 - DNA, 15 bp, Homo sapiens
taatgaggaaaggag

SEQ ID NO: 179425 - DNA, 15 bp, Homo sapiens
aatgaggaaaggagg

SEQ ID NO: 179426 - DNA, 15 bp, Homo sapiens
atgaggaaaggagga

SEQ ID NO: 179427 - DNA, 15 bp, Homo sapiens
tgaggaaaggaggaa

SEQ ID NO: 179428 - DNA, 15 bp, Homo sapiens
gaggaaaggaggaag

SEQ ID NO: 179429 - DNA, 15 bp, Homo sapiens
aggaaaggaggaagt

SEQ ID NO: 179430 - DNA, 15 bp, Homo sapiens
ggaaaggaggaagtc

SEQ ID NO: 179431 - DNA, 15 bp, Homo sapiens
gaaaggaggaagtcc

SEQ ID NO: 179432 - DNA, 15 bp, Homo sapiens
aaaggaggaagtcct

SEQ ID NO: 179433 - DNA, 15 bp, Homo sapiens
aaggaggaagtcctt

SEQ ID NO: 179434 - DNA, 15 bp, Homo sapiens
aggaggaagtcctta

SEQ ID NO: 179435 - DNA, 15 bp, Homo sapiens
ggaggaagtccttaa

SEQ ID NO: 179436 - DNA, 15 bp, Homo sapiens
gaggaagtccttaaa

SEQ ID NO: 179437 - DNA, 15 bp, Homo sapiens
aggaagtccttaaac

SEQ ID NO: 179438 - DNA, 15 bp, Homo sapiens
ggaagtccttaaact

SEQ ID NO: 179439 - DNA, 15 bp, Homo sapiens
gaagtccttaaactc

SEQ ID NO: 179440 - DNA, 15 bp, Homo sapiens
aagtccttaaactca

SEQ ID NO: 179441 - DNA, 15 bp, Homo sapiens
agtccttaaactcag

SEQ ID NO: 179442 - DNA, 15 bp, Homo sapiens
gtccttaaactcagt

SEQ ID NO: 179443 - DNA, 15 bp, Homo sapiens
tccttaaactcagtc

SEQ ID NO: 179444 - DNA, 15 bp, Homo sapiens
ccttaaactcagtcc

SEQ ID NO: 179445 - DNA, 15 bp, Homo sapiens
cttaaactcagtcct

SEQ ID NO: 179446 - DNA, 15 bp, Homo sapiens
ttaaactcagtccta

SEQ ID NO: 179447 - DNA, 15 bp, Homo sapiens
taaactcagtcctaa

SEQ ID NO: 179448 - DNA, 15 bp, Homo sapiens
aaactcagtcctaaa

SEQ ID NO: 179449 - DNA, 15 bp, Homo sapiens
aactcagtcctaaaa

SEQ ID NO: 179450 - DNA, 15 bp, Homo sapiens
actcagtcctaaaag

SEQ ID NO: 179451 - DNA, 15 bp, Homo sapiens
ctcagtcctaaaaga

SEQ ID NO: 179452 - DNA, 15 bp, Homo sapiens
tcagtcctaaaagac

SEQ ID NO: 179453 - DNA, 15 bp, Homo sapiens
cagtcctaaaagaca

SEQ ID NO: 179454 - DNA, 15 bp, Homo sapiens
agtcctaaaagacaa

SEQ ID NO: 179455 - DNA, 15 bp, Homo sapiens
gtcctaaaagacaaa

SEQ ID NO: 179456 - DNA, 15 bp, Homo sapiens
tcctaaaagacaaaa

SEQ ID NO: 179457 - DNA, 15 bp, Homo sapiens
cctaaaagacaaaac

SEQ ID NO: 179458 - DNA, 15 bp, Homo sapiens
ctaaaagacaaaacc

SEQ ID NO: 179459 - DNA, 15 bp, Homo sapiens
taaaagacaaaacct

SEQ ID NO: 179460 - DNA, 15 bp, Homo sapiens
aaaagacaaaacctg

SEQ ID NO: 179461 - DNA, 15 bp, Homo sapiens
aaagacaaaacctgg

SEQ ID NO: 179462 - DNA, 15 bp, Homo sapiens
aagacaaaacctggc

SEQ ID NO: 179463 - DNA, 15 bp, Homo sapiens
agacaaaacctggca

SEQ ID NO: 179464 - DNA, 15 bp, Homo sapiens
gacaaaacctggcag

SEQ ID NO: 179465 - DNA, 15 bp, Homo sapiens
acaaaacctggcagg

SEQ ID NO: 179466 - DNA, 15 bp, Homo sapiens
caaaacctggcagga

SEQ ID NO: 179467 - DNA, 15 bp, Homo sapiens
aaaacctggcaggaa

SEQ ID NO: 179468 - DNA, 15 bp, Homo sapiens
aaacctggcaggaaa

SEQ ID NO: 179469 - DNA, 15 bp, Homo sapiens
aacctggcaggaaaa

SEQ ID NO: 179470 - DNA, 15 bp, Homo sapiens
acctggcaggaaaat

SEQ ID NO: 179471 - DNA, 15 bp, Homo sapiens
cctggcaggaaaata

SEQ ID NO: 179472 - DNA, 15 bp, Homo sapiens
ctggcaggaaaatat

SEQ ID NO: 179473 - DNA, 15 bp, Homo sapiens
tggcaggaaaatatg

SEQ ID NO: 179474 - DNA, 15 bp, Homo sapiens
ggcaggaaaatatgt

SEQ ID NO: 179475 - DNA, 15 bp, Homo sapiens
gcaggaaaatatgtc

SEQ ID NO: 179476 - DNA, 15 bp, Homo sapiens
caggaaaatatgtcc

SEQ ID NO: 179477 - DNA, 15 bp, Homo sapiens
aggaaaatatgtcca

SEQ ID NO: 179478 - DNA, 15 bp, Homo sapiens
ggaaaatatgtccag

SEQ ID NO: 179479 - DNA, 15 bp, Homo sapiens
gaaaatatgtccagc

SEQ ID NO: 179480 - DNA, 15 bp, Homo sapiens
aaaatatgtccagcc

SEQ ID NO: 179481 - DNA, 15 bp, Homo sapiens
aaatatgtccagcca

SEQ ID NO: 179482 - DNA, 15 bp, Homo sapiens
aatatgtccagccat

SEQ ID NO: 179483 - DNA, 15 bp, Homo sapiens
atatgtccagccata

SEQ ID NO: 179484 - DNA, 15 bp, Homo sapiens
tatgtccagccatat

SEQ ID NO: 179485 - DNA, 15 bp, Homo sapiens
atgtccagccatatt

SEQ ID NO: 179486 - DNA, 15 bp, Homo sapiens
tgtccagccatattt

SEQ ID NO: 179487 - DNA, 15 bp, Homo sapiens
gtccagccatatttt

SEQ ID NO: 179488 - DNA, 15 bp, Homo sapiens
tccagccatattttt

SEQ ID NO: 179489 - DNA, 15 bp, Homo sapiens
ccagccatatttttt

SEQ ID NO: 179490 - DNA, 15 bp, Homo sapiens
cagccatatttttta

SEQ ID NO: 179491 - DNA, 15 bp, Homo sapiens
agccatattttttaa

SEQ ID NO: 179492 - DNA, 15 bp, Homo sapiens
gccatattttttaag

SEQ ID NO: 179493 - DNA, 15 bp, Homo sapiens
ccatattttttaagg

SEQ ID NO: 179494 - DNA, 15 bp, Homo sapiens
catattttttaaggc

SEQ ID NO: 179495 - DNA, 15 bp, Homo sapiens
atattttttaaggcc

SEQ ID NO: 179496 - DNA, 15 bp, Homo sapiens
tattttttaaggcca

SEQ ID NO: 179497 - DNA, 15 bp, Homo sapiens
attttttaaggccat

SEQ ID NO: 179498 - DNA, 15 bp, Homo sapiens
ttttttaaggccata

SEQ ID NO: 179499 - DNA, 15 bp, Homo sapiens
tttttaaggccatac

SEQ ID NO: 179500 - DNA, 15 bp, Homo sapiens
ttttaaggccataca

SEQ ID NO: 179501 - DNA, 15 bp, Homo sapiens
tttaaggccatacag

SEQ ID NO: 179502 - DNA, 15 bp, Homo sapiens
ttaaggccatacaga

SEQ ID NO: 179503 - DNA, 15 bp, Homo sapiens
taaggccatacagaa

SEQ ID NO: 179504 - DNA, 15 bp, Homo sapiens
aaggccatacagaag

SEQ ID NO: 179505 - DNA, 15 bp, Homo sapiens
aggccatacagaagc

SEQ ID NO: 179506 - DNA, 15 bp, Homo sapiens
ggccatacagaagca

SEQ ID NO: 179507 - DNA, 15 bp, Homo sapiens
gccatacagaagcaa

SEQ ID NO: 179508 - DNA, 15 bp, Homo sapiens
ccatacagaagcaag

SEQ ID NO: 179509 - DNA, 15 bp, Homo sapiens
catacagaagcaagt

SEQ ID NO: 179510 - DNA, 15 bp, Homo sapiens
atacagaagcaagtg

SEQ ID NO: 179511 - DNA, 15 bp, Homo sapiens
tacagaagcaagtgg

SEQ ID NO: 179512 - DNA, 15 bp, Homo sapiens
acagaagcaagtggc

SEQ ID NO: 179513 - DNA, 15 bp, Homo sapiens
cagaagcaagtggca

SEQ ID NO: 179514 - DNA, 15 bp, Homo sapiens
agaagcaagtggcag

SEQ ID NO: 179515 - DNA, 15 bp, Homo sapiens
gaagcaagtggcagg

SEQ ID NO: 179516 - DNA, 15 bp, Homo sapiens
aagcaagtggcagga

SEQ ID NO: 179517 - DNA, 15 bp, Homo sapiens
agcaagtggcaggat

SEQ ID NO: 179518 - DNA, 15 bp, Homo sapiens
gcaagtggcaggata

SEQ ID NO: 179519 - DNA, 15 bp, Homo sapiens
caagtggcaggatat

SEQ ID NO: 179520 - DNA, 15 bp, Homo sapiens
aagtggcaggatatt

SEQ ID NO: 179521 - DNA, 15 bp, Homo sapiens
agtggcaggatattc

SEQ ID NO: 179522 - DNA, 15 bp, Homo sapiens
gtggcaggatattcc

SEQ ID NO: 179523 - DNA, 15 bp, Homo sapiens
tggcaggatattcca

SEQ ID NO: 179524 - DNA, 15 bp, Homo sapiens
ggcaggatattccag

SEQ ID NO: 179525 - DNA, 15 bp, Homo sapiens
gcaggatattccaga

SEQ ID NO: 179526 - DNA, 15 bp, Homo sapiens
caggatattccagat

SEQ ID NO: 179527 - DNA, 15 bp, Homo sapiens
aggatattccagatt

SEQ ID NO: 179528 - DNA, 15 bp, Homo sapiens
ggatattccagatta

SEQ ID NO: 179529 - DNA, 15 bp, Homo sapiens
gatattccagattag

SEQ ID NO: 179530 - DNA, 15 bp, Homo sapiens
atattccagattagg

SEQ ID NO: 179531 - DNA, 15 bp, Homo sapiens
tattccagattaggg

SEQ ID NO: 179532 - DNA, 15 bp, Homo sapiens
attccagattaggga

SEQ ID NO: 179533 - DNA, 15 bp, Homo sapiens
ttccagattagggaa

SEQ ID NO: 179534 - DNA, 15 bp, Homo sapiens
tccagattagggaaa

SEQ ID NO: 179535 - DNA, 15 bp, Homo sapiens
ccagattagggaaat

SEQ ID NO: 179536 - DNA, 15 bp, Homo sapiens
cagattagggaaatg

SEQ ID NO: 179537 - DNA, 15 bp, Homo sapiens
agattagggaaatgt

SEQ ID NO: 179538 - DNA, 15 bp, Homo sapiens
gattagggaaatgtg

SEQ ID NO: 179539 - DNA, 15 bp, Homo sapiens
attagggaaatgtgt

SEQ ID NO: 179540 - DNA, 15 bp, Homo sapiens
ttagggaaatgtgtg

SEQ ID NO: 179541 - DNA, 15 bp, Homo sapiens
tagggaaatgtgtga

SEQ ID NO: 179542 - DNA, 15 bp, Homo sapiens
agggaaatgtgtgat

SEQ ID NO: 179543 - DNA, 15 bp, Homo sapiens
gggaaatgtgtgatg

SEQ ID NO: 179544 - DNA, 15 bp, Homo sapiens
ggaaatgtgtgatga

SEQ ID NO: 179545 - DNA, 15 bp, Homo sapiens
gaaatgtgtgatgag

SEQ ID NO: 179546 - DNA, 15 bp, Homo sapiens
aaatgtgtgatgaga

SEQ ID NO: 179547 - DNA, 15 bp, Homo sapiens
aatgtgtgatgagag

SEQ ID NO: 179548 - DNA, 15 bp, Homo sapiens
atgtgtgatgagagg

SEQ ID NO: 179549 - DNA, 15 bp, Homo sapiens
tgtgtgatgagaggc

SEQ ID NO: 179550 - DNA, 15 bp, Homo sapiens
gtgtgatgagaggcc

SEQ ID NO: 179551 - DNA, 15 bp, Homo sapiens
tgtgatgagaggccc

SEQ ID NO: 179552 - DNA, 15 bp, Homo sapiens
gtgatgagaggccca

SEQ ID NO: 179553 - DNA, 15 bp, Homo sapiens
tgatgagaggcccat

SEQ ID NO: 179554 - DNA, 15 bp, Homo sapiens
gatgagaggcccatg

SEQ ID NO: 179555 - DNA, 15 bp, Homo sapiens
atgagaggcccatgg

SEQ ID NO: 179556 - DNA, 15 bp, Homo sapiens
tgagaggcccatggt

SEQ ID NO: 179557 - DNA, 15 bp, Homo sapiens
gagaggcccatggta

SEQ ID NO: 179558 - DNA, 15 bp, Homo sapiens
agaggcccatggtag

SEQ ID NO: 179559 - DNA, 15 bp, Homo sapiens
gaggcccatggtaga

SEQ ID NO: 179560 - DNA, 15 bp, Homo sapiens
aggcccatggtagaa

SEQ ID NO: 179561 - DNA, 15 bp, Homo sapiens
ggcccatggtagaaa

SEQ ID NO: 179562 - DNA, 15 bp, Homo sapiens
gcccatggtagaaag

SEQ ID NO: 179563 - DNA, 15 bp, Homo sapiens
cccatggtagaaaga

SEQ ID NO: 179564 - DNA, 15 bp, Homo sapiens
ccatggtagaaagaa

SEQ ID NO: 179565 - DNA, 15 bp, Homo sapiens
catggtagaaagaat

SEQ ID NO: 179566 - DNA, 15 bp, Homo sapiens
atggtagaaagaatg

SEQ ID NO: 179567 - DNA, 15 bp, Homo sapiens
tggtagaaagaatgg

SEQ ID NO: 179568 - DNA, 15 bp, Homo sapiens
ggtagaaagaatggg

SEQ ID NO: 179569 - DNA, 15 bp, Homo sapiens
gtagaaagaatgggg

SEQ ID NO: 179570 - DNA, 15 bp, Homo sapiens
tagaaagaatgggga

SEQ ID NO: 179571 - DNA, 15 bp, Homo sapiens
agaaagaatggggaa

SEQ ID NO: 179572 - DNA, 15 bp, Homo sapiens
gaaagaatggggaaa

SEQ ID NO: 179573 - DNA, 15 bp, Homo sapiens
aaagaatggggaaat

SEQ ID NO: 179574 - DNA, 15 bp, Homo sapiens
aagaatggggaaatt

SEQ ID NO: 179575 - DNA, 15 bp, Homo sapiens
agaatggggaaattg

SEQ ID NO: 179576 - DNA, 15 bp, Homo sapiens
gaatggggaaattgg

SEQ ID NO: 179577 - DNA, 15 bp, Homo sapiens
aatggggaaattggc

SEQ ID NO: 179578 - DNA, 15 bp, Homo sapiens
atggggaaattggct

SEQ ID NO: 179579 - DNA, 15 bp, Homo sapiens
tggggaaattggctt

SEQ ID NO: 179580 - DNA, 15 bp, Homo sapiens
ggggaaattggcttg

SEQ ID NO: 179581 - DNA, 15 bp, Homo sapiens
gggaaattggcttgt

SEQ ID NO: 179582 - DNA, 15 bp, Homo sapiens
ggaaattggcttgtt

SEQ ID NO: 179583 - DNA, 15 bp, Homo sapiens
gaaattggcttgttt

SEQ ID NO: 179584 - DNA, 15 bp, Homo sapiens
aaattggcttgtttg

SEQ ID NO: 179585 - DNA, 15 bp, Homo sapiens
aattggcttgtttgg

SEQ ID NO: 179586 - DNA, 15 bp, Homo sapiens
attggcttgtttggc

SEQ ID NO: 179587 - DNA, 15 bp, Homo sapiens
ttggcttgtttggct

SEQ ID NO: 179588 - DNA, 15 bp, Homo sapiens
tggcttgtttggctg

SEQ ID NO: 179589 - DNA, 15 bp, Homo sapiens
ggcttgtttggctgg

SEQ ID NO: 179590 - DNA, 15 bp, Homo sapiens
gcttgtttggctgga

SEQ ID NO: 179591 - DNA, 15 bp, Homo sapiens
cttgtttggctggag

SEQ ID NO: 179592 - DNA, 15 bp, Homo sapiens
ttgtttggctggagt

SEQ ID NO: 179593 - DNA, 15 bp, Homo sapiens
tgtttggctggagta

SEQ ID NO: 179594 - DNA, 15 bp, Homo sapiens
gtttggctggagtaa

SEQ ID NO: 179595 - DNA, 15 bp, Homo sapiens
tttggctggagtaat

SEQ ID NO: 179596 - DNA, 15 bp, Homo sapiens
ttggctggagtaatg

SEQ ID NO: 179597 - DNA, 15 bp, Homo sapiens
tggctggagtaatgc

SEQ ID NO: 179598 - DNA, 15 bp, Homo sapiens
ggctggagtaatgca

SEQ ID NO: 179599 - DNA, 15 bp, Homo sapiens
gctggagtaatgcaa

SEQ ID NO: 179600 - DNA, 15 bp, Homo sapiens
ctggagtaatgcaaa

SEQ ID NO: 179601 - DNA, 15 bp, Homo sapiens
tggagtaatgcaaag

SEQ ID NO: 179602 - DNA, 15 bp, Homo sapiens
ggagtaatgcaaaga

SEQ ID NO: 179603 - DNA, 15 bp, Homo sapiens
gagtaatgcaaagag

SEQ ID NO: 179604 - DNA, 15 bp, Homo sapiens
agtaatgcaaagagt

SEQ ID NO: 179605 - DNA, 15 bp, Homo sapiens
gtaatgcaaagagta

SEQ ID NO: 179606 - DNA, 15 bp, Homo sapiens
taatgcaaagagtac

SEQ ID NO: 179607 - DNA, 15 bp, Homo sapiens
aatgcaaagagtaca

SEQ ID NO: 179608 - DNA, 15 bp, Homo sapiens
atgcaaagagtacac

SEQ ID NO: 179609 - DNA, 15 bp, Homo sapiens
tgcaaagagtacaca

SEQ ID NO: 179610 - DNA, 15 bp, Homo sapiens
gcaaagagtacacag

SEQ ID NO: 179611 - DNA, 15 bp, Homo sapiens
caaagagtacacagc

SEQ ID NO: 179612 - DNA, 15 bp, Homo sapiens
aaagagtacacagca

SEQ ID NO: 179613 - DNA, 15 bp, Homo sapiens
aagagtacacagcag

SEQ ID NO: 179614 - DNA, 15 bp, Homo sapiens
agagtacacagcagg

SEQ ID NO: 179615 - DNA, 15 bp, Homo sapiens
gagtacacagcaggc

SEQ ID NO: 179616 - DNA, 15 bp, Homo sapiens
agtacacagcaggca

SEQ ID NO: 179617 - DNA, 15 bp, Homo sapiens
gtacacagcaggcac

SEQ ID NO: 179618 - DNA, 15 bp, Homo sapiens
tacacagcaggcacc

SEQ ID NO: 179619 - DNA, 15 bp, Homo sapiens
acacagcaggcacca

SEQ ID NO: 179620 - DNA, 15 bp, Homo sapiens
cacagcaggcaccat

SEQ ID NO: 179621 - DNA, 15 bp, Homo sapiens
acagcaggcaccatt

SEQ ID NO: 179622 - DNA, 15 bp, Homo sapiens
cagcaggcaccattg

SEQ ID NO: 179623 - DNA, 15 bp, Homo sapiens
agcaggcaccattgg

SEQ ID NO: 179624 - DNA, 15 bp, Homo sapiens
gcaggcaccattggt

SEQ ID NO: 179625 - DNA, 15 bp, Homo sapiens
caggcaccattggtt

SEQ ID NO: 179626 - DNA, 15 bp, Homo sapiens
aggcaccattggttg

SEQ ID NO: 179627 - DNA, 15 bp, Homo sapiens
ggcaccattggttgt

SEQ ID NO: 179628 - DNA, 15 bp, Homo sapiens
gcaccattggttgta

SEQ ID NO: 179629 - DNA, 15 bp, Homo sapiens
caccattggttgtat

SEQ ID NO: 179630 - DNA, 15 bp, Homo sapiens
accattggttgtatc

SEQ ID NO: 179631 - DNA, 15 bp, Homo sapiens
ccattggttgtatct

SEQ ID NO: 179632 - DNA, 15 bp, Homo sapiens
cattggttgtatctg

SEQ ID NO: 179633 - DNA, 15 bp, Homo sapiens
attggttgtatctgg

SEQ ID NO: 179634 - DNA, 15 bp, Homo sapiens
ttggttgtatctgga

SEQ ID NO: 179635 - DNA, 15 bp, Homo sapiens
tggttgtatctggaa

SEQ ID NO: 179636 - DNA, 15 bp, Homo sapiens
ggttgtatctggaaa

SEQ ID NO: 179637 - DNA, 15 bp, Homo sapiens
gttgtatctggaaaa

SEQ ID NO: 179638 - DNA, 15 bp, Homo sapiens
ttgtatctggaaaat

SEQ ID NO: 179639 - DNA, 15 bp, Homo sapiens
tgtatctggaaaatc

SEQ ID NO: 179640 - DNA, 15 bp, Homo sapiens
gtatctggaaaatcc

SEQ ID NO: 179641 - DNA, 15 bp, Homo sapiens
tatctggaaaatcct

SEQ ID NO: 179642 - DNA, 15 bp, Homo sapiens
atctggaaaatcctt

SEQ ID NO: 179643 - DNA, 15 bp, Homo sapiens
tctggaaaatccttg

SEQ ID NO: 179644 - DNA, 15 bp, Homo sapiens
ctggaaaatccttga

SEQ ID NO: 179645 - DNA, 15 bp, Homo sapiens
tggaaaatccttgac

SEQ ID NO: 179646 - DNA, 15 bp, Homo sapiens
ggaaaatccttgaca

SEQ ID NO: 179647 - DNA, 15 bp, Homo sapiens
gaaaatccttgacag

SEQ ID NO: 179648 - DNA, 15 bp, Homo sapiens
aaaatccttgacaga

SEQ ID NO: 179649 - DNA, 15 bp, Homo sapiens
aaatccttgacagaa

SEQ ID NO: 179650 - DNA, 15 bp, Homo sapiens
aatccttgacagaag

SEQ ID NO: 179651 - DNA, 15 bp, Homo sapiens
atccttgacagaaga

SEQ ID NO: 179652 - DNA, 15 bp, Homo sapiens
tccttgacagaagag

SEQ ID NO: 179653 - DNA, 15 bp, Homo sapiens
ccttgacagaagagg

SEQ ID NO: 179654 - DNA, 15 bp, Homo sapiens
cttgacagaagaggc

SEQ ID NO: 179655 - DNA, 15 bp, Homo sapiens
ttgacagaagaggcc

SEQ ID NO: 179656 - DNA, 15 bp, Homo sapiens
tgacagaagaggcct

SEQ ID NO: 179657 - DNA, 15 bp, Homo sapiens
gacagaagaggcctg

SEQ ID NO: 179658 - DNA, 15 bp, Homo sapiens
acagaagaggcctga

SEQ ID NO: 179659 - DNA, 15 bp, Homo sapiens
cagaagaggcctgat

SEQ ID NO: 179660 - DNA, 15 bp, Homo sapiens
agaagaggcctgatg

SEQ ID NO: 179661 - DNA, 15 bp, Homo sapiens
gaagaggcctgatga

SEQ ID NO: 179662 - DNA, 15 bp, Homo sapiens
aagaggcctgatgaa

SEQ ID NO: 179663 - DNA, 15 bp, Homo sapiens
agaggcctgatgaaa

SEQ ID NO: 179664 - DNA, 15 bp, Homo sapiens
gaggcctgatgaaag

SEQ ID NO: 179665 - DNA, 15 bp, Homo sapiens
aggcctgatgaaagg

SEQ ID NO: 179666 - DNA, 15 bp, Homo sapiens
ggcctgatgaaaggg

SEQ ID NO: 179667 - DNA, 15 bp, Homo sapiens
gcctgatgaaaggga

SEQ ID NO: 179668 - DNA, 15 bp, Homo sapiens
cctgatgaaagggaa

SEQ ID NO: 179669 - DNA, 15 bp, Homo sapiens
ctgatgaaagggaag

SEQ ID NO: 179670 - DNA, 15 bp, Homo sapiens
tgatgaaagggaagc

SEQ ID NO: 179671 - DNA, 15 bp, Homo sapiens
gatgaaagggaagcc

SEQ ID NO: 179672 - DNA, 15 bp, Homo sapiens
atgaaagggaagcca

SEQ ID NO: 179673 - DNA, 15 bp, Homo sapiens
tgaaagggaagccac

SEQ ID NO: 179674 - DNA, 15 bp, Homo sapiens
gaaagggaagccact

SEQ ID NO: 179675 - DNA, 15 bp, Homo sapiens
aaagggaagccactt

SEQ ID NO: 179676 - DNA, 15 bp, Homo sapiens
aagggaagccacttg

SEQ ID NO: 179677 - DNA, 15 bp, Homo sapiens
agggaagccacttgg

SEQ ID NO: 179678 - DNA, 15 bp, Homo sapiens
gggaagccacttggc

SEQ ID NO: 179679 - DNA, 15 bp, Homo sapiens
ggaagccacttggca

SEQ ID NO: 179680 - DNA, 15 bp, Homo sapiens
gaagccacttggcaa

SEQ ID NO: 179681 - DNA, 15 bp, Homo sapiens
aagccacttggcaaa

SEQ ID NO: 179682 - DNA, 15 bp, Homo sapiens
agccacttggcaaat

SEQ ID NO: 179683 - DNA, 15 bp, Homo sapiens
gccacttggcaaatc

SEQ ID NO: 179684 - DNA, 15 bp, Homo sapiens
ccacttggcaaatcc

SEQ ID NO: 179685 - DNA, 15 bp, Homo sapiens
cacttggcaaatcca

SEQ ID NO: 179686 - DNA, 15 bp, Homo sapiens
acttggcaaatccac

SEQ ID NO: 179687 - DNA, 15 bp, Homo sapiens
cttggcaaatccaca

SEQ ID NO: 179688 - DNA, 15 bp, Homo sapiens
ttggcaaatccacat

SEQ ID NO: 179689 - DNA, 15 bp, Homo sapiens
tggcaaatccacatc

SEQ ID NO: 179690 - DNA, 15 bp, Homo sapiens
ggcaaatccacatca

SEQ ID NO: 179691 - DNA, 15 bp, Homo sapiens
gcaaatccacatcag

SEQ ID NO: 179692 - DNA, 15 bp, Homo sapiens
caaatccacatcaga

SEQ ID NO: 179693 - DNA, 15 bp, Homo sapiens
aaatccacatcagag

SEQ ID NO: 179694 - DNA, 15 bp, Homo sapiens
aatccacatcagagc

SEQ ID NO: 179695 - DNA, 15 bp, Homo sapiens
atccacatcagagcc

SEQ ID NO: 179696 - DNA, 15 bp, Homo sapiens
tccacatcagagcct

SEQ ID NO: 179697 - DNA, 15 bp, Homo sapiens
ccacatcagagcctc

SEQ ID NO: 179698 - DNA, 15 bp, Homo sapiens
cacatcagagcctca

SEQ ID NO: 179699 - DNA, 15 bp, Homo sapiens
acatcagagcctcag

SEQ ID NO: 179700 - DNA, 15 bp, Homo sapiens
catcagagcctcagt

SEQ ID NO: 179701 - DNA, 15 bp, Homo sapiens
atcagagcctcagta

SEQ ID NO: 179702 - DNA, 15 bp, Homo sapiens
tcagagcctcagtat

SEQ ID NO: 179703 - DNA, 15 bp, Homo sapiens
cagagcctcagtatg

SEQ ID NO: 179704 - DNA, 15 bp, Homo sapiens
agagcctcagtatgg

SEQ ID NO: 179705 - DNA, 15 bp, Homo sapiens
gagcctcagtatggc

SEQ ID NO: 179706 - DNA, 15 bp, Homo sapiens
agcctcagtatggca

SEQ ID NO: 179707 - DNA, 15 bp, Homo sapiens
gcctcagtatggcaa

SEQ ID NO: 179708 - DNA, 15 bp, Homo sapiens
cctcagtatggcaag

SEQ ID NO: 179709 - DNA, 15 bp, Homo sapiens
ctcagtatggcaagc

SEQ ID NO: 179710 - DNA, 15 bp, Homo sapiens
tcagtatggcaagct

SEQ ID NO: 179711 - DNA, 15 bp, Homo sapiens
cagtatggcaagcta

SEQ ID NO: 179712 - DNA, 15 bp, Homo sapiens
agtatggcaagctac

SEQ ID NO: 179713 - DNA, 15 bp, Homo sapiens
gtatggcaagctacc

SEQ ID NO: 179714 - DNA, 15 bp, Homo sapiens
tatggcaagctacct

SEQ ID NO: 179715 - DNA, 15 bp, Homo sapiens
atggcaagctacctg

SEQ ID NO: 179716 - DNA, 15 bp, Homo sapiens
tggcaagctacctga

SEQ ID NO: 179717 - DNA, 15 bp, Homo sapiens
ggcaagctacctgaa

SEQ ID NO: 179718 - DNA, 15 bp, Homo sapiens
gcaagctacctgaac

SEQ ID NO: 179719 - DNA, 15 bp, Homo sapiens
caagctacctgaaca

SEQ ID NO: 179720 - DNA, 15 bp, Homo sapiens
aagctacctgaacac

SEQ ID NO: 179721 - DNA, 15 bp, Homo sapiens
agctacctgaacacc

SEQ ID NO: 179722 - DNA, 15 bp, Homo sapiens
gctacctgaacacct

SEQ ID NO: 179723 - DNA, 15 bp, Homo sapiens
ctacctgaacacctg

SEQ ID NO: 179724 - DNA, 15 bp, Homo sapiens
tacctgaacacctga

SEQ ID NO: 179725 - DNA, 15 bp, Homo sapiens
acctgaacacctgag

SEQ ID NO: 179726 - DNA, 15 bp, Homo sapiens
cctgaacacctgagg

SEQ ID NO: 179727 - DNA, 15 bp, Homo sapiens
ctgaacacctgaggg

SEQ ID NO: 179728 - DNA, 15 bp, Homo sapiens
tgaacacctgaggga

SEQ ID NO: 179729 - DNA, 15 bp, Homo sapiens
gaacacctgagggaa

SEQ ID NO: 179730 - DNA, 15 bp, Homo sapiens
aacacctgagggaaa

SEQ ID NO: 179731 - DNA, 15 bp, Homo sapiens
acacctgagggaaag

SEQ ID NO: 179732 - DNA, 15 bp, Homo sapiens
cacctgagggaaagt

SEQ ID NO: 179733 - DNA, 15 bp, Homo sapiens
acctgagggaaagta

SEQ ID NO: 179734 - DNA, 15 bp, Homo sapiens
cctgagggaaagtaa

SEQ ID NO: 179735 - DNA, 15 bp, Homo sapiens
ctgagggaaagtaaa

SEQ ID NO: 179736 - DNA, 15 bp, Homo sapiens
tgagggaaagtaaac

SEQ ID NO: 179737 - DNA, 15 bp, Homo sapiens
gagggaaagtaaacc

SEQ ID NO: 179738 - DNA, 15 bp, Homo sapiens
agggaaagtaaaccc

SEQ ID NO: 179739 - DNA, 15 bp, Homo sapiens
gggaaagtaaacccg

SEQ ID NO: 179740 - DNA, 15 bp, Homo sapiens
ggaaagtaaacccgt

SEQ ID NO: 179741 - DNA, 15 bp, Homo sapiens
gaaagtaaacccgtt

SEQ ID NO: 179742 - DNA, 15 bp, Homo sapiens
aaagtaaacccgttg

SEQ ID NO: 179743 - DNA, 15 bp, Homo sapiens
aagtaaacccgttgc

SEQ ID NO: 179744 - DNA, 15 bp, Homo sapiens
agtaaacccgttgca

SEQ ID NO: 179745 - DNA, 15 bp, Homo sapiens
gtaaacccgttgcat

SEQ ID NO: 179746 - DNA, 15 bp, Homo sapiens
taaacccgttgcatt

SEQ ID NO: 179747 - DNA, 15 bp, Homo sapiens
aaacccgttgcattt

SEQ ID NO: 179748 - DNA, 15 bp, Homo sapiens
aacccgttgcatttt

SEQ ID NO: 179749 - DNA, 15 bp, Homo sapiens
acccgttgcattttt

SEQ ID NO: 179750 - DNA, 15 bp, Homo sapiens
cccgttgcatttttt

SEQ ID NO: 179751 - DNA, 15 bp, Homo sapiens
ccgttgcatttttta

SEQ ID NO: 179752 - DNA, 15 bp, Homo sapiens
cgttgcattttttaa

SEQ ID NO: 179753 - DNA, 15 bp, Homo sapiens
gttgcattttttaaa

SEQ ID NO: 179754 - DNA, 15 bp, Homo sapiens
ttgcattttttaaaa

SEQ ID NO: 179755 - DNA, 15 bp, Homo sapiens
tgcattttttaaaag

SEQ ID NO: 179756 - DNA, 15 bp, Homo sapiens
gcattttttaaaagg

SEQ ID NO: 179757 - DNA, 15 bp, Homo sapiens
cattttttaaaaggt

SEQ ID NO: 179758 - DNA, 15 bp, Homo sapiens
attttttaaaaggtt

SEQ ID NO: 179759 - DNA, 15 bp, Homo sapiens
ttttttaaaaggttt

SEQ ID NO: 179760 - DNA, 15 bp, Homo sapiens
tttttaaaaggtttt

SEQ ID NO: 179761 - DNA, 15 bp, Homo sapiens
ttttaaaaggtttta

SEQ ID NO: 179762 - DNA, 15 bp, Homo sapiens
tttaaaaggttttaa

SEQ ID NO: 179763 - DNA, 15 bp, Homo sapiens
ttaaaaggttttaaa

SEQ ID NO: 179764 - DNA, 15 bp, Homo sapiens
taaaaggttttaaat

SEQ ID NO: 179765 - DNA, 15 bp, Homo sapiens
aaaaggttttaaatg

SEQ ID NO: 179766 - DNA, 15 bp, Homo sapiens
aaaggttttaaatgg

SEQ ID NO: 179767 - DNA, 15 bp, Homo sapiens
aaggttttaaatgga

SEQ ID NO: 179768 - DNA, 15 bp, Homo sapiens
aggttttaaatggaa

SEQ ID NO: 179769 - DNA, 15 bp, Homo sapiens
ggttttaaatggaat

SEQ ID NO: 179770 - DNA, 15 bp, Homo sapiens
gttttaaatggaata

SEQ ID NO: 179771 - DNA, 15 bp, Homo sapiens
ttttaaatggaatat

SEQ ID NO: 179772 - DNA, 15 bp, Homo sapiens
tttaaatggaatatt

SEQ ID NO: 179773 - DNA, 15 bp, Homo sapiens
ttaaatggaatattt

SEQ ID NO: 179774 - DNA, 15 bp, Homo sapiens
taaatggaatatttg

SEQ ID NO: 179775 - DNA, 15 bp, Homo sapiens
aaatggaatatttga

SEQ ID NO: 179776 - DNA, 15 bp, Homo sapiens
aatggaatatttgag

SEQ ID NO: 179777 - DNA, 15 bp, Homo sapiens
atggaatatttgagc

SEQ ID NO: 179778 - DNA, 15 bp, Homo sapiens
tggaatatttgagcc

SEQ ID NO: 179779 - DNA, 15 bp, Homo sapiens
ggaatatttgagcct

SEQ ID NO: 179780 - DNA, 15 bp, Homo sapiens
gaatatttgagcctt

SEQ ID NO: 179781 - DNA, 15 bp, Homo sapiens
aatatttgagccttt

SEQ ID NO: 179782 - DNA, 15 bp, Homo sapiens
atatttgagcctttc

SEQ ID NO: 179783 - DNA, 15 bp, Homo sapiens
tatttgagcctttct

SEQ ID NO: 179784 - DNA, 15 bp, Homo sapiens
atttgagcctttctc

SEQ ID NO: 179785 - DNA, 15 bp, Homo sapiens
tttgagcctttctct

SEQ ID NO: 179786 - DNA, 15 bp, Homo sapiens
ttgagcctttctctt

SEQ ID NO: 179787 - DNA, 15 bp, Homo sapiens
tgagcctttctcttt

SEQ ID NO: 179788 - DNA, 15 bp, Homo sapiens
gagcctttctctttt

SEQ ID NO: 179789 - DNA, 15 bp, Homo sapiens
agcctttctcttttc

SEQ ID NO: 179790 - DNA, 15 bp, Homo sapiens
gcctttctcttttca

SEQ ID NO: 179791 - DNA, 15 bp, Homo sapiens
cctttctcttttcaa

SEQ ID NO: 179792 - DNA, 15 bp, Homo sapiens
ctttctcttttcaaa

SEQ ID NO: 179793 - DNA, 15 bp, Homo sapiens
tttctcttttcaaac

SEQ ID NO: 179794 - DNA, 15 bp, Homo sapiens
ttctcttttcaaact

SEQ ID NO: 179795 - DNA, 15 bp, Homo sapiens
tctcttttcaaacta

SEQ ID NO: 179796 - DNA, 15 bp, Homo sapiens
ctcttttcaaactaa

SEQ ID NO: 179797 - DNA, 15 bp, Homo sapiens
tcttttcaaactaat

SEQ ID NO: 179798 - DNA, 15 bp, Homo sapiens
cttttcaaactaatt

SEQ ID NO: 179799 - DNA, 15 bp, Homo sapiens
ttttcaaactaattc

SEQ ID NO: 179800 - DNA, 15 bp, Homo sapiens
tttcaaactaattct

SEQ ID NO: 179801 - DNA, 15 bp, Homo sapiens
ttcaaactaattctc

SEQ ID NO: 179802 - DNA, 15 bp, Homo sapiens
tcaaactaattctcc

SEQ ID NO: 179803 - DNA, 15 bp, Homo sapiens
caaactaattctcct

SEQ ID NO: 179804 - DNA, 15 bp, Homo sapiens
aaactaattctcctc

SEQ ID NO: 179805 - DNA, 15 bp, Homo sapiens
aactaattctcctct

SEQ ID NO: 179806 - DNA, 15 bp, Homo sapiens
actaattctcctctg

SEQ ID NO: 179807 - DNA, 15 bp, Homo sapiens
ctaattctcctctgt

SEQ ID NO: 179808 - DNA, 15 bp, Homo sapiens
taattctcctctgtg

SEQ ID NO: 179809 - DNA, 15 bp, Homo sapiens
aattctcctctgtgt

SEQ ID NO: 179810 - DNA, 15 bp, Homo sapiens
attctcctctgtgtc

SEQ ID NO: 179811 - DNA, 15 bp, Homo sapiens
ttctcctctgtgtct

SEQ ID NO: 179812 - DNA, 15 bp, Homo sapiens
tctcctctgtgtctg

SEQ ID NO: 179813 - DNA, 15 bp, Homo sapiens
ctcctctgtgtctgc

SEQ ID NO: 179814 - DNA, 15 bp, Homo sapiens
tcctctgtgtctgct

SEQ ID NO: 179815 - DNA, 15 bp, Homo sapiens
cctctgtgtctgctt

SEQ ID NO: 179816 - DNA, 15 bp, Homo sapiens
ctctgtgtctgcttt

SEQ ID NO: 179817 - DNA, 15 bp, Homo sapiens
tctgtgtctgcttta

SEQ ID NO: 179818 - DNA, 15 bp, Homo sapiens
ctgtgtctgctttat

SEQ ID NO: 179819 - DNA, 15 bp, Homo sapiens
tgtgtctgctttatt

SEQ ID NO: 179820 - DNA, 15 bp, Homo sapiens
gtgtctgctttattc

SEQ ID NO: 179821 - DNA, 15 bp, Homo sapiens
tgtctgctttattcc

SEQ ID NO: 179822 - DNA, 15 bp, Homo sapiens
gtctgctttattcca

SEQ ID NO: 179823 - DNA, 15 bp, Homo sapiens
tctgctttattccag

SEQ ID NO: 179824 - DNA, 15 bp, Homo sapiens
ctgctttattccagg

SEQ ID NO: 179825 - DNA, 15 bp, Homo sapiens
tgctttattccaggt

SEQ ID NO: 179826 - DNA, 15 bp, Homo sapiens
gctttattccaggtt

SEQ ID NO: 179827 - DNA, 15 bp, Homo sapiens
ctttattccaggttt

SEQ ID NO: 179828 - DNA, 15 bp, Homo sapiens
tttattccaggtttt

SEQ ID NO: 179829 - DNA, 15 bp, Homo sapiens
ttattccaggttttg

SEQ ID NO: 179830 - DNA, 15 bp, Homo sapiens
tattccaggttttgt

SEQ ID NO: 179831 - DNA, 15 bp, Homo sapiens
attccaggttttgtg

SEQ ID NO: 179832 - DNA, 15 bp, Homo sapiens
ttccaggttttgtgt

SEQ ID NO: 179833 - DNA, 15 bp, Homo sapiens
tccaggttttgtgta

SEQ ID NO: 179834 - DNA, 15 bp, Homo sapiens
ccaggttttgtgtac

SEQ ID NO: 179835 - DNA, 15 bp, Homo sapiens
caggttttgtgtaca

SEQ ID NO: 179836 - DNA, 15 bp, Homo sapiens
aggttttgtgtacag

SEQ ID NO: 179837 - DNA, 15 bp, Homo sapiens
ggttttgtgtacagc

SEQ ID NO: 179838 - DNA, 15 bp, Homo sapiens
gttttgtgtacagct

SEQ ID NO: 179839 - DNA, 15 bp, Homo sapiens
ttttgtgtacagctt

SEQ ID NO: 179840 - DNA, 15 bp, Homo sapiens
tttgtgtacagcttg

SEQ ID NO: 179841 - DNA, 15 bp, Homo sapiens
ttgtgtacagcttgg

SEQ ID NO: 179842 - DNA, 15 bp, Homo sapiens
tgtgtacagcttggg

SEQ ID NO: 179843 - DNA, 15 bp, Homo sapiens
gtgtacagcttggga

SEQ ID NO: 179844 - DNA, 15 bp, Homo sapiens
tgtacagcttgggaa

SEQ ID NO: 179845 - DNA, 15 bp, Homo sapiens
gtacagcttgggaat

SEQ ID NO: 179846 - DNA, 15 bp, Homo sapiens
tacagcttgggaatg

SEQ ID NO: 179847 - DNA, 15 bp, Homo sapiens
acagcttgggaatga

SEQ ID NO: 179848 - DNA, 15 bp, Homo sapiens
cagcttgggaatgaa

SEQ ID NO: 179849 - DNA, 15 bp, Homo sapiens
agcttgggaatgaaa

SEQ ID NO: 179850 - DNA, 15 bp, Homo sapiens
gcttgggaatgaaaa

SEQ ID NO: 179851 - DNA, 15 bp, Homo sapiens
cttgggaatgaaaag

SEQ ID NO: 179852 - DNA, 15 bp, Homo sapiens
ttgggaatgaaaagg

SEQ ID NO: 179853 - DNA, 15 bp, Homo sapiens
tgggaatgaaaaggt

SEQ ID NO: 179854 - DNA, 15 bp, Homo sapiens
gggaatgaaaaggtt

SEQ ID NO: 179855 - DNA, 15 bp, Homo sapiens
ggaatgaaaaggttg

SEQ ID NO: 179856 - DNA, 15 bp, Homo sapiens
gaatgaaaaggttga

SEQ ID NO: 179857 - DNA, 15 bp, Homo sapiens
aatgaaaaggttgat

SEQ ID NO: 179858 - DNA, 15 bp, Homo sapiens
atgaaaaggttgatt

SEQ ID NO: 179859 - DNA, 15 bp, Homo sapiens
tgaaaaggttgattg

SEQ ID NO: 179860 - DNA, 15 bp, Homo sapiens
gaaaaggttgattgt

SEQ ID NO: 179861 - DNA, 15 bp, Homo sapiens
aaaaggttgattgta

SEQ ID NO: 179862 - DNA, 15 bp, Homo sapiens
aaaggttgattgtaa

SEQ ID NO: 179863 - DNA, 15 bp, Homo sapiens
aaggttgattgtaaa

SEQ ID NO: 179864 - DNA, 15 bp, Homo sapiens
aggttgattgtaaac

SEQ ID NO: 179865 - DNA, 15 bp, Homo sapiens
ggttgattgtaaacc

SEQ ID NO: 179866 - DNA, 15 bp, Homo sapiens
gttgattgtaaaccc

SEQ ID NO: 179867 - DNA, 15 bp, Homo sapiens
ttgattgtaaaccca

SEQ ID NO: 179868 - DNA, 15 bp, Homo sapiens
tgattgtaaacccac

SEQ ID NO: 179869 - DNA, 15 bp, Homo sapiens
gattgtaaacccaca

SEQ ID NO: 179870 - DNA, 15 bp, Homo sapiens
attgtaaacccacag

SEQ ID NO: 179871 - DNA, 15 bp, Homo sapiens
ttgtaaacccacagt

SEQ ID NO: 179872 - DNA, 15 bp, Homo sapiens
tgtaaacccacagta

SEQ ID NO: 179873 - DNA, 15 bp, Homo sapiens
gtaaacccacagtat

SEQ ID NO: 179874 - DNA, 15 bp, Homo sapiens
taaacccacagtatc

SEQ ID NO: 179875 - DNA, 15 bp, Homo sapiens
aaacccacagtatct

SEQ ID NO: 179876 - DNA, 15 bp, Homo sapiens
aacccacagtatcta

SEQ ID NO: 179877 - DNA, 15 bp, Homo sapiens
acccacagtatctag

SEQ ID NO: 179878 - DNA, 15 bp, Homo sapiens
cccacagtatctagc

SEQ ID NO: 179879 - DNA, 15 bp, Homo sapiens
ccacagtatctagca

SEQ ID NO: 179880 - DNA, 15 bp, Homo sapiens
cacagtatctagcag

SEQ ID NO: 179881 - DNA, 15 bp, Homo sapiens
acagtatctagcagc

SEQ ID NO: 179882 - DNA, 15 bp, Homo sapiens
cagtatctagcagcg

SEQ ID NO: 179883 - DNA, 15 bp, Homo sapiens
agtatctagcagcgt

SEQ ID NO: 179884 - DNA, 15 bp, Homo sapiens
gtatctagcagcgtt

SEQ ID NO: 179885 - DNA, 15 bp, Homo sapiens
tatctagcagcgttg

SEQ ID NO: 179886 - DNA, 15 bp, Homo sapiens
atctagcagcgttgt

SEQ ID NO: 179887 - DNA, 15 bp, Homo sapiens
tctagcagcgttgtg

SEQ ID NO: 179888 - DNA, 15 bp, Homo sapiens
ctagcagcgttgtgc

SEQ ID NO: 179889 - DNA, 15 bp, Homo sapiens
tagcagcgttgtgcc

SEQ ID NO: 179890 - DNA, 15 bp, Homo sapiens
agcagcgttgtgcca

SEQ ID NO: 179891 - DNA, 15 bp, Homo sapiens
gcagcgttgtgccaa

SEQ ID NO: 179892 - DNA, 15 bp, Homo sapiens
cagcgttgtgccaaa

SEQ ID NO: 179893 - DNA, 15 bp, Homo sapiens
agcgttgtgccaaat

SEQ ID NO: 179894 - DNA, 15 bp, Homo sapiens
gcgttgtgccaaatt

SEQ ID NO: 179895 - DNA, 15 bp, Homo sapiens
cgttgtgccaaattg

SEQ ID NO: 179896 - DNA, 15 bp, Homo sapiens
gttgtgccaaattgc

SEQ ID NO: 179897 - DNA, 15 bp, Homo sapiens
ttgtgccaaattgcc

SEQ ID NO: 179898 - DNA, 15 bp, Homo sapiens
tgtgccaaattgccc

SEQ ID NO: 179899 - DNA, 15 bp, Homo sapiens
gtgccaaattgccct

SEQ ID NO: 179900 - DNA, 15 bp, Homo sapiens
tgccaaattgccctt

SEQ ID NO: 179901 - DNA, 15 bp, Homo sapiens
gccaaattgcccttg

SEQ ID NO: 179902 - DNA, 15 bp, Homo sapiens
ccaaattgcccttgt

SEQ ID NO: 179903 - DNA, 15 bp, Homo sapiens
caaattgcccttgtg

SEQ ID NO: 179904 - DNA, 15 bp, Homo sapiens
aaattgcccttgtgt

SEQ ID NO: 179905 - DNA, 15 bp, Homo sapiens
aattgcccttgtgtt

SEQ ID NO: 179906 - DNA, 15 bp, Homo sapiens
attgcccttgtgttt

SEQ ID NO: 179907 - DNA, 15 bp, Homo sapiens
ttgcccttgtgtttc

SEQ ID NO: 179908 - DNA, 15 bp, Homo sapiens
tgcccttgtgtttct

SEQ ID NO: 179909 - DNA, 15 bp, Homo sapiens
gcccttgtgtttctc

SEQ ID NO: 179910 - DNA, 15 bp, Homo sapiens
cccttgtgtttctct

SEQ ID NO: 179911 - DNA, 15 bp, Homo sapiens
ccttgtgtttctctc

SEQ ID NO: 179912 - DNA, 15 bp, Homo sapiens
cttgtgtttctctcc

SEQ ID NO: 179913 - DNA, 15 bp, Homo sapiens
ttgtgtttctctcca

SEQ ID NO: 179914 - DNA, 15 bp, Homo sapiens
tgtgtttctctccac

SEQ ID NO: 179915 - DNA, 15 bp, Homo sapiens
gtgtttctctccacc

SEQ ID NO: 179916 - DNA, 15 bp, Homo sapiens
tgtttctctccaccc

SEQ ID NO: 179917 - DNA, 15 bp, Homo sapiens
gtttctctccaccca

SEQ ID NO: 179918 - DNA, 15 bp, Homo sapiens
tttctctccacccaa

SEQ ID NO: 179919 - DNA, 15 bp, Homo sapiens
ttctctccacccaaa

SEQ ID NO: 179920 - DNA, 15 bp, Homo sapiens
tctctccacccaaaa

SEQ ID NO: 179921 - DNA, 15 bp, Homo sapiens
ctctccacccaaaat

SEQ ID NO: 179922 - DNA, 15 bp, Homo sapiens
tctccacccaaaata

SEQ ID NO: 179923 - DNA, 15 bp, Homo sapiens
ctccacccaaaatat

SEQ ID NO: 179924 - DNA, 15 bp, Homo sapiens
tccacccaaaatatc

SEQ ID NO: 179925 - DNA, 15 bp, Homo sapiens
ccacccaaaatatca

SEQ ID NO: 179926 - DNA, 15 bp, Homo sapiens
cacccaaaatatcac

SEQ ID NO: 179927 - DNA, 15 bp, Homo sapiens
acccaaaatatcaca

SEQ ID NO: 179928 - DNA, 15 bp, Homo sapiens
cccaaaatatcacag

SEQ ID NO: 179929 - DNA, 15 bp, Homo sapiens
ccaaaatatcacagc

SEQ ID NO: 179930 - DNA, 15 bp, Homo sapiens
caaaatatcacagct

SEQ ID NO: 179931 - DNA, 15 bp, Homo sapiens
aaaatatcacagctg

SEQ ID NO: 179932 - DNA, 15 bp, Homo sapiens
aaatatcacagctgc

SEQ ID NO: 179933 - DNA, 15 bp, Homo sapiens
aatatcacagctgct

SEQ ID NO: 179934 - DNA, 15 bp, Homo sapiens
atatcacagctgctt

SEQ ID NO: 179935 - DNA, 15 bp, Homo sapiens
tatcacagctgcttt

SEQ ID NO: 179936 - DNA, 15 bp, Homo sapiens
atcacagctgctttc

SEQ ID NO: 179937 - DNA, 15 bp, Homo sapiens
tcacagctgctttcc

SEQ ID NO: 179938 - DNA, 15 bp, Homo sapiens
cacagctgctttcct

SEQ ID NO: 179939 - DNA, 15 bp, Homo sapiens
acagctgctttcctc

SEQ ID NO: 179940 - DNA, 15 bp, Homo sapiens
cagctgctttcctca

SEQ ID NO: 179941 - DNA, 15 bp, Homo sapiens
agctgctttcctcac

SEQ ID NO: 179942 - DNA, 15 bp, Homo sapiens
gctgctttcctcaca

SEQ ID NO: 179943 - DNA, 15 bp, Homo sapiens
ctgctttcctcacat

SEQ ID NO: 179944 - DNA, 15 bp, Homo sapiens
tgctttcctcacatt

SEQ ID NO: 179945 - DNA, 15 bp, Homo sapiens
gctttcctcacattt

SEQ ID NO: 179946 - DNA, 15 bp, Homo sapiens
ctttcctcacatttg

SEQ ID NO: 179947 - DNA, 15 bp, Homo sapiens
tttcctcacatttgg

SEQ ID NO: 179948 - DNA, 15 bp, Homo sapiens
ttcctcacatttggt

SEQ ID NO: 179949 - DNA, 15 bp, Homo sapiens
tcctcacatttggtt

SEQ ID NO: 179950 - DNA, 15 bp, Homo sapiens
cctcacatttggttc

SEQ ID NO: 179951 - DNA, 15 bp, Homo sapiens
ctcacatttggttca

SEQ ID NO: 179952 - DNA, 15 bp, Homo sapiens
tcacatttggttcat

SEQ ID NO: 179953 - DNA, 15 bp, Homo sapiens
cacatttggttcatc

SEQ ID NO: 179954 - DNA, 15 bp, Homo sapiens
acatttggttcatcc

SEQ ID NO: 179955 - DNA, 15 bp, Homo sapiens
catttggttcatccg

SEQ ID NO: 179956 - DNA, 15 bp, Homo sapiens
atttggttcatccgt

SEQ ID NO: 179957 - DNA, 15 bp, Homo sapiens
tttggttcatccgtg

SEQ ID NO: 179958 - DNA, 15 bp, Homo sapiens
ttggttcatccgtgt

SEQ ID NO: 179959 - DNA, 15 bp, Homo sapiens
tggttcatccgtgtg

SEQ ID NO: 179960 - DNA, 15 bp, Homo sapiens
ggttcatccgtgtgc

SEQ ID NO: 179961 - DNA, 15 bp, Homo sapiens
gttcatccgtgtgct

SEQ ID NO: 179962 - DNA, 15 bp, Homo sapiens
ttcatccgtgtgctg

SEQ ID NO: 179963 - DNA, 15 bp, Homo sapiens
tcatccgtgtgctgt

SEQ ID NO: 179964 - DNA, 15 bp, Homo sapiens
catccgtgtgctgtt

SEQ ID NO: 179965 - DNA, 15 bp, Homo sapiens
atccgtgtgctgttc

SEQ ID NO: 179966 - DNA, 15 bp, Homo sapiens
tccgtgtgctgttct

SEQ ID NO: 179967 - DNA, 15 bp, Homo sapiens
ccgtgtgctgttctt

SEQ ID NO: 179968 - DNA, 15 bp, Homo sapiens
cgtgtgctgttcttt

SEQ ID NO: 179969 - DNA, 15 bp, Homo sapiens
gtgtgctgttctttt

SEQ ID NO: 179970 - DNA, 15 bp, Homo sapiens
tgtgctgttcttttg

SEQ ID NO: 179971 - DNA, 15 bp, Homo sapiens
gtgctgttcttttgg

SEQ ID NO: 179972 - DNA, 15 bp, Homo sapiens
tgctgttcttttggg

SEQ ID NO: 179973 - DNA, 15 bp, Homo sapiens
gctgttcttttgggt

SEQ ID NO: 179974 - DNA, 15 bp, Homo sapiens
ctgttcttttgggtt

SEQ ID NO: 179975 - DNA, 15 bp, Homo sapiens
tgttcttttgggttc

SEQ ID NO: 179976 - DNA, 15 bp, Homo sapiens
gttcttttgggttct

SEQ ID NO: 179977 - DNA, 15 bp, Homo sapiens
ttcttttgggttctg

SEQ ID NO: 179978 - DNA, 15 bp, Homo sapiens
tcttttgggttctga

SEQ ID NO: 179979 - DNA, 15 bp, Homo sapiens
cttttgggttctgag

SEQ ID NO: 179980 - DNA, 15 bp, Homo sapiens
ttttgggttctgaga

SEQ ID NO: 179981 - DNA, 15 bp, Homo sapiens
tttgggttctgagag

SEQ ID NO: 179982 - DNA, 15 bp, Homo sapiens
ttgggttctgagagg

SEQ ID NO: 179983 - DNA, 15 bp, Homo sapiens
tgggttctgagaggg

SEQ ID NO: 179984 - DNA, 15 bp, Homo sapiens
gggttctgagagggt

SEQ ID NO: 179985 - DNA, 15 bp, Homo sapiens
ggttctgagagggtt

SEQ ID NO: 179986 - DNA, 15 bp, Homo sapiens
gttctgagagggttt

SEQ ID NO: 179987 - DNA, 15 bp, Homo sapiens
ttctgagagggtttt

SEQ ID NO: 179988 - DNA, 15 bp, Homo sapiens
tctgagagggttttg

SEQ ID NO: 179989 - DNA, 15 bp, Homo sapiens
ctgagagggttttgc

SEQ ID NO: 179990 - DNA, 15 bp, Homo sapiens
tgagagggttttgcc

SEQ ID NO: 179991 - DNA, 15 bp, Homo sapiens
gagagggttttgcca

SEQ ID NO: 179992 - DNA, 15 bp, Homo sapiens
agagggttttgccat

SEQ ID NO: 179993 - DNA, 15 bp, Homo sapiens
gagggttttgccatg

SEQ ID NO: 179994 - DNA, 15 bp, Homo sapiens
ggttttgccatgttt

SEQ ID NO: 179995 - DNA, 15 bp, Homo sapiens
gttttgccatgtttg

SEQ ID NO: 179996 - DNA, 15 bp, Homo sapiens
ttttgccatgtttgc

SEQ ID NO: 179997 - DNA, 15 bp, Homo sapiens
tttgccatgtttgct

SEQ ID NO: 179998 - DNA, 15 bp, Homo sapiens
ttgccatgtttgctt

SEQ ID NO: 179999 - DNA, 15 bp, Homo sapiens
tgccatgtttgcttg

SEQ ID NO: 180000 - DNA, 15 bp, Homo sapiens
gccatgtttgcttgt

SEQ ID NO: 180001 - DNA, 15 bp, Homo sapiens
ccatgtttgcttgta

SEQ ID NO: 180002 - DNA, 15 bp, Homo sapiens
catgtttgcttgtat

SEQ ID NO: 180003 - DNA, 15 bp, Homo sapiens
atgtttgcttgtatg

SEQ ID NO: 180004 - DNA, 15 bp, Homo sapiens
tgtttgcttgtatga

SEQ ID NO: 180005 - DNA, 15 bp, Homo sapiens
gtttgcttgtatgac

SEQ ID NO: 180006 - DNA, 15 bp, Homo sapiens
tttgcttgtatgacc

SEQ ID NO: 180007 - DNA, 15 bp, Homo sapiens
ttgcttgtatgacca

SEQ ID NO: 180008 - DNA, 15 bp, Homo sapiens
tgcttgtatgaccaa

SEQ ID NO: 180009 - DNA, 15 bp, Homo sapiens
gcttgtatgaccaag

SEQ ID NO: 180010 - DNA, 15 bp, Homo sapiens
cttgtatgaccaagt

SEQ ID NO: 180011 - DNA, 15 bp, Homo sapiens
ttgtatgaccaagtc

SEQ ID NO: 180012 - DNA, 15 bp, Homo sapiens
tgtatgaccaagtca

SEQ ID NO: 180013 - DNA, 15 bp, Homo sapiens
gtatgaccaagtcac

SEQ ID NO: 180014 - DNA, 15 bp, Homo sapiens
tatgaccaagtcacc

SEQ ID NO: 180015 - DNA, 15 bp, Homo sapiens
atgaccaagtcacca

SEQ ID NO: 180016 - DNA, 15 bp, Homo sapiens
tgaccaagtcaccaa

SEQ ID NO: 180017 - DNA, 15 bp, Homo sapiens
gaccaagtcaccaag

SEQ ID NO: 180018 - DNA, 15 bp, Homo sapiens
accaagtcaccaagg

SEQ ID NO: 180019 - DNA, 15 bp, Homo sapiens
ccaagtcaccaagga

SEQ ID NO: 180020 - DNA, 15 bp, Homo sapiens
caagtcaccaaggaa

SEQ ID NO: 180021 - DNA, 15 bp, Homo sapiens
aagtcaccaaggaaa

SEQ ID NO: 180022 - DNA, 15 bp, Homo sapiens
agtcaccaaggaaat

SEQ ID NO: 180023 - DNA, 15 bp, Homo sapiens
gtcaccaaggaaata

SEQ ID NO: 180024 - DNA, 15 bp, Homo sapiens
tcaccaaggaaataa

SEQ ID NO: 180025 - DNA, 15 bp, Homo sapiens
caccaaggaaataaa

SEQ ID NO: 180026 - DNA, 15 bp, Homo sapiens
accaaggaaataaac

SEQ ID NO: 180027 - DNA, 15 bp, Homo sapiens
ccaaggaaataaaca

SEQ ID NO: 180028 - DNA, 15 bp, Homo sapiens
caaggaaataaacag

SEQ ID NO: 180029 - DNA, 15 bp, Homo sapiens
aaggaaataaacagg

SEQ ID NO: 180030 - DNA, 15 bp, Homo sapiens
aggaaataaacagga

SEQ ID NO: 180031 - DNA, 15 bp, Homo sapiens
ggaaataaacaggaa

SEQ ID NO: 180032 - DNA, 15 bp, Homo sapiens
gaaataaacaggaag

SEQ ID NO: 180033 - DNA, 15 bp, Homo sapiens
aaataaacaggaagg

SEQ ID NO: 180034 - DNA, 15 bp, Homo sapiens
aataaacaggaagga

SEQ ID NO: 180035 - DNA, 15 bp, Homo sapiens
ataaacaggaaggaa

SEQ ID NO: 180036 - DNA, 15 bp, Homo sapiens
taaacaggaaggaaa

SEQ ID NO: 180037 - DNA, 15 bp, Homo sapiens
aaacaggaaggaaat

SEQ ID NO: 180038 - DNA, 15 bp, Homo sapiens
aacaggaaggaaatc

SEQ ID NO: 180039 - DNA, 15 bp, Homo sapiens
acaggaaggaaatcc

SEQ ID NO: 180040 - DNA, 15 bp, Homo sapiens
caggaaggaaatcca

SEQ ID NO: 180041 - DNA, 15 bp, Homo sapiens
aggaaggaaatccat

SEQ ID NO: 180042 - DNA, 15 bp, Homo sapiens
ggaaggaaatccatg

SEQ ID NO: 180043 - DNA, 15 bp, Homo sapiens
gaaggaaatccatgt

SEQ ID NO: 180044 - DNA, 15 bp, Homo sapiens
aaggaaatccatgtt

SEQ ID NO: 180045 - DNA, 15 bp, Homo sapiens
aggaaatccatgttc

SEQ ID NO: 180046 - DNA, 15 bp, Homo sapiens
ggaaatccatgttct

SEQ ID NO: 180047 - DNA, 15 bp, Homo sapiens
gaaatccatgttctc

SEQ ID NO: 180048 - DNA, 15 bp, Homo sapiens
aaatccatgttctcc

SEQ ID NO: 180049 - DNA, 15 bp, Homo sapiens
aatccatgttctcca

SEQ ID NO: 180050 - DNA, 15 bp, Homo sapiens
atccatgttctccat

SEQ ID NO: 180051 - DNA, 15 bp, Homo sapiens
tccatgttctccatc

SEQ ID NO: 180052 - DNA, 15 bp, Homo sapiens
ccatgttctccatct

SEQ ID NO: 180053 - DNA, 15 bp, Homo sapiens
catgttctccatctt

SEQ ID NO: 180054 - DNA, 15 bp, Homo sapiens
atgttctccatcttt

SEQ ID NO: 180055 - DNA, 15 bp, Homo sapiens
tgttctccatctttt

SEQ ID NO: 180056 - DNA, 15 bp, Homo sapiens
gttctccatcttttg

SEQ ID NO: 180057 - DNA, 15 bp, Homo sapiens
ttctccatcttttgt

SEQ ID NO: 180058 - DNA, 15 bp, Homo sapiens
tctccatcttttgtg

SEQ ID NO: 180059 - DNA, 15 bp, Homo sapiens
ctccatcttttgtga

SEQ ID NO: 180060 - DNA, 15 bp, Homo sapiens
tccatcttttgtgaa

SEQ ID NO: 180061 - DNA, 15 bp, Homo sapiens
ccatcttttgtgaaa

SEQ ID NO: 180062 - DNA, 15 bp, Homo sapiens
catcttttgtgaaag

SEQ ID NO: 180063 - DNA, 15 bp, Homo sapiens
atcttttgtgaaagt

SEQ ID NO: 180064 - DNA, 15 bp, Homo sapiens
tcttttgtgaaagta

SEQ ID NO: 180065 - DNA, 15 bp, Homo sapiens
cttttgtgaaagtat

SEQ ID NO: 180066 - DNA, 15 bp, Homo sapiens
ttttgtgaaagtata

SEQ ID NO: 180067 - DNA, 15 bp, Homo sapiens
tttgtgaaagtatat

SEQ ID NO: 180068 - DNA, 15 bp, Homo sapiens
ttgtgaaagtatatt

SEQ ID NO: 180069 - DNA, 15 bp, Homo sapiens
tgtgaaagtatattt

SEQ ID NO: 180070 - DNA, 15 bp, Homo sapiens
gtgaaagtatatttg

SEQ ID NO: 180071 - DNA, 15 bp, Homo sapiens
tgaaagtatatttga

SEQ ID NO: 180072 - DNA, 15 bp, Homo sapiens
gaaagtatatttgag

SEQ ID NO: 180073 - DNA, 15 bp, Homo sapiens
aaagtatatttgagt

SEQ ID NO: 180074 - DNA, 15 bp, Homo sapiens
aagtatatttgagtt

SEQ ID NO: 180075 - DNA, 15 bp, Homo sapiens
agtatatttgagttg

SEQ ID NO: 180076 - DNA, 15 bp, Homo sapiens
gtatatttgagttgg

SEQ ID NO: 180077 - DNA, 15 bp, Homo sapiens
tatatttgagttggt

SEQ ID NO: 180078 - DNA, 15 bp, Homo sapiens
atatttgagttggtg

SEQ ID NO: 180079 - DNA, 15 bp, Homo sapiens
tatttgagttggtgg

SEQ ID NO: 180080 - DNA, 15 bp, Homo sapiens
atttgagttggtggt

SEQ ID NO: 180081 - DNA, 15 bp, Homo sapiens
tttgagttggtggtt

SEQ ID NO: 180082 - DNA, 15 bp, Homo sapiens
ttgagttggtggttt

SEQ ID NO: 180083 - DNA, 15 bp, Homo sapiens
tgagttggtggtttt

SEQ ID NO: 180084 - DNA, 15 bp, Homo sapiens
gagttggtggttttt

SEQ ID NO: 180085 - DNA, 15 bp, Homo sapiens
agttggtggtttttt

SEQ ID NO: 180086 - DNA, 15 bp, Homo sapiens
gttggtggttttttg

SEQ ID NO: 180087 - DNA, 15 bp, Homo sapiens
ttggtggttttttgt

SEQ ID NO: 180088 - DNA, 15 bp, Homo sapiens
tggtggttttttgtt

SEQ ID NO: 180089 - DNA, 15 bp, Homo sapiens
ggtggttttttgttt

SEQ ID NO: 180090 - DNA, 15 bp, Homo sapiens
gtggttttttgtttt

SEQ ID NO: 180091 - DNA, 15 bp, Homo sapiens
tggttttttgttttg

SEQ ID NO: 180092 - DNA, 15 bp, Homo sapiens
ggttttttgttttgt

SEQ ID NO: 180093 - DNA, 15 bp, Homo sapiens
gttttttgttttgtt

SEQ ID NO: 180094 - DNA, 15 bp, Homo sapiens
ttttttgttttgttt

SEQ ID NO: 180095 - DNA, 15 bp, Homo sapiens
tttttgttttgtttg

SEQ ID NO: 180096 - DNA, 15 bp, Homo sapiens
ttttgttttgtttgg

SEQ ID NO: 180097 - DNA, 15 bp, Homo sapiens
tttgttttgtttggg

SEQ ID NO: 180098 - DNA, 15 bp, Homo sapiens
ttgttttgtttgggg

SEQ ID NO: 180099 - DNA, 15 bp, Homo sapiens
tgttttgtttggggg

SEQ ID NO: 180100 - DNA, 15 bp, Homo sapiens
gttttgtttgggggt

SEQ ID NO: 180101 - DNA, 15 bp, Homo sapiens
ttttgtttgggggtt

SEQ ID NO: 180102 - DNA, 15 bp, Homo sapiens
tttgtttgggggttt

SEQ ID NO: 180103 - DNA, 15 bp, Homo sapiens
ttgtttgggggtttg

SEQ ID NO: 180104 - DNA, 15 bp, Homo sapiens
tgtttgggggtttgt

SEQ ID NO: 180105 - DNA, 15 bp, Homo sapiens
gtttgggggtttgtg

SEQ ID NO: 180106 - DNA, 15 bp, Homo sapiens
tttgggggtttgtgt

SEQ ID NO: 180107 - DNA, 15 bp, Homo sapiens
ttgggggtttgtgtt

SEQ ID NO: 180108 - DNA, 15 bp, Homo sapiens
tgggggtttgtgttt

SEQ ID NO: 180109 - DNA, 15 bp, Homo sapiens
gggggtttgtgtttt

SEQ ID NO: 180110 - DNA, 15 bp, Homo sapiens
ggggtttgtgttttg

SEQ ID NO: 180111 - DNA, 15 bp, Homo sapiens
gggtttgtgttttgt

SEQ ID NO: 180112 - DNA, 15 bp, Homo sapiens
ggtttgtgttttgtt

SEQ ID NO: 180113 - DNA, 15 bp, Homo sapiens
gtttgtgttttgttt

SEQ ID NO: 180114 - DNA, 15 bp, Homo sapiens
tttgtgttttgtttt

SEQ ID NO: 180115 - DNA, 15 bp, Homo sapiens
ttgtgttttgttttg

SEQ ID NO: 180116 - DNA, 15 bp, Homo sapiens
tgtgttttgttttgt

SEQ ID NO: 180117 - DNA, 15 bp, Homo sapiens
gtgttttgttttgtt

SEQ ID NO: 180118 - DNA, 15 bp, Homo sapiens
tgttttgttttgttt

SEQ ID NO: 180119 - DNA, 15 bp, Homo sapiens
gttttgttttgtttt

SEQ ID NO: 180120 - DNA, 15 bp, Homo sapiens
ttttgttttgttttt

SEQ ID NO: 180121 - DNA, 15 bp, Homo sapiens
ttgttttgtttttgg

SEQ ID NO: 180122 - DNA, 15 bp, Homo sapiens
tgttttgtttttggt

SEQ ID NO: 180123 - DNA, 15 bp, Homo sapiens
gttttgtttttggta

SEQ ID NO: 180124 - DNA, 15 bp, Homo sapiens
ttttgtttttggtat

SEQ ID NO: 180125 - DNA, 15 bp, Homo sapiens
tttgtttttggtatg

SEQ ID NO: 180126 - DNA, 15 bp, Homo sapiens
ttgtttttggtatgt

SEQ ID NO: 180127 - DNA, 15 bp, Homo sapiens
tgtttttggtatgtt

SEQ ID NO: 180128 - DNA, 15 bp, Homo sapiens
gtttttggtatgttt

SEQ ID NO: 180129 - DNA, 15 bp, Homo sapiens
tttttggtatgtttt

SEQ ID NO: 180130 - DNA, 15 bp, Homo sapiens
ttttggtatgttttc

SEQ ID NO: 180131 - DNA, 15 bp, Homo sapiens
tttggtatgttttct

SEQ ID NO: 180132 - DNA, 15 bp, Homo sapiens
ttggtatgttttctt

SEQ ID NO: 180133 - DNA, 15 bp, Homo sapiens
tggtatgttttcttc

SEQ ID NO: 180134 - DNA, 15 bp, Homo sapiens
ggtatgttttcttcc

SEQ ID NO: 180135 - DNA, 15 bp, Homo sapiens
gtatgttttcttcca

SEQ ID NO: 180136 - DNA, 15 bp, Homo sapiens
tatgttttcttccag

SEQ ID NO: 180137 - DNA, 15 bp, Homo sapiens
atgttttcttccaga

SEQ ID NO: 180138 - DNA, 15 bp, Homo sapiens
tgttttcttccagag

SEQ ID NO: 180139 - DNA, 15 bp, Homo sapiens
gttttcttccagagg

SEQ ID NO: 180140 - DNA, 15 bp, Homo sapiens
ttttcttccagaggt

SEQ ID NO: 180141 - DNA, 15 bp, Homo sapiens
tttcttccagaggtg

SEQ ID NO: 180142 - DNA, 15 bp, Homo sapiens
ttcttccagaggtga

SEQ ID NO: 180143 - DNA, 15 bp, Homo sapiens
tcttccagaggtgat

SEQ ID NO: 180144 - DNA, 15 bp, Homo sapiens
cttccagaggtgata

SEQ ID NO: 180145 - DNA, 15 bp, Homo sapiens
ttccagaggtgatat

SEQ ID NO: 180146 - DNA, 15 bp, Homo sapiens
tccagaggtgatata

SEQ ID NO: 180147 - DNA, 15 bp, Homo sapiens
ccagaggtgatatac

SEQ ID NO: 180148 - DNA, 15 bp, Homo sapiens
cagaggtgatatact

SEQ ID NO: 180149 - DNA, 15 bp, Homo sapiens
agaggtgatatactt

SEQ ID NO: 180150 - DNA, 15 bp, Homo sapiens
gaggtgatatacttt

SEQ ID NO: 180151 - DNA, 15 bp, Homo sapiens
aggtgatatactttc

SEQ ID NO: 180152 - DNA, 15 bp, Homo sapiens
ggtgatatactttct

SEQ ID NO: 180153 - DNA, 15 bp, Homo sapiens
gtgatatactttctt

SEQ ID NO: 180154 - DNA, 15 bp, Homo sapiens
tgatatactttcttt

SEQ ID NO: 180155 - DNA, 15 bp, Homo sapiens
gatatactttctttt

SEQ ID NO: 180156 - DNA, 15 bp, Homo sapiens
atatactttcttttt

SEQ ID NO: 180157 - DNA, 15 bp, Homo sapiens
tatactttctttttt

SEQ ID NO: 180158 - DNA, 15 bp, Homo sapiens
atactttcttttttt

SEQ ID NO: 180159 - DNA, 15 bp, Homo sapiens
tactttctttttttt

SEQ ID NO: 180160 - DNA, 15 bp, Homo sapiens
actttcttttttttc

SEQ ID NO: 180161 - DNA, 15 bp, Homo sapiens
ctttcttttttttct

SEQ ID NO: 180162 - DNA, 15 bp, Homo sapiens
tttcttttttttctt

SEQ ID NO: 180163 - DNA, 15 bp, Homo sapiens
ttcttttttttcttc

SEQ ID NO: 180164 - DNA, 15 bp, Homo sapiens
tcttttttttcttcc

SEQ ID NO: 180165 - DNA, 15 bp, Homo sapiens
cttttttttcttcct

SEQ ID NO: 180166 - DNA, 15 bp, Homo sapiens
ttttttttcttcctt

SEQ ID NO: 180167 - DNA, 15 bp, Homo sapiens
tttttttcttccttt

SEQ ID NO: 180168 - DNA, 15 bp, Homo sapiens
ttttttcttcctttc

SEQ ID NO: 180169 - DNA, 15 bp, Homo sapiens
tttttcttcctttct

SEQ ID NO: 180170 - DNA, 15 bp, Homo sapiens
tttcttcctttcttt

SEQ ID NO: 180171 - DNA, 15 bp, Homo sapiens
ttcttcctttctttt

SEQ ID NO: 180172 - DNA, 15 bp, Homo sapiens
tcttcctttcttttt

SEQ ID NO: 180173 - DNA, 15 bp, Homo sapiens
cttcctttctttttt

SEQ ID NO: 180174 - DNA, 15 bp, Homo sapiens
ttcctttcttttttt

SEQ ID NO: 180175 - DNA, 15 bp, Homo sapiens
tcctttctttttttt

SEQ ID NO: 180176 - DNA, 15 bp, Homo sapiens
cctttcttttttttc

SEQ ID NO: 180177 - DNA, 15 bp, Homo sapiens
ttcttttttttcttt

SEQ ID NO: 180178 - DNA, 15 bp, Homo sapiens
tcttttttttctttc

SEQ ID NO: 180179 - DNA, 15 bp, Homo sapiens
cttttttttctttcg

SEQ ID NO: 180180 - DNA, 15 bp, Homo sapiens
ttttttttctttcgt

SEQ ID NO: 180181 - DNA, 15 bp, Homo sapiens
tttttttctttcgtt

SEQ ID NO: 180182 - DNA, 15 bp, Homo sapiens
ttttttctttcgttc

SEQ ID NO: 180183 - DNA, 15 bp, Homo sapiens
tttttctttcgttcc

SEQ ID NO: 180184 - DNA, 15 bp, Homo sapiens
ttttctttcgttcct

SEQ ID NO: 180185 - DNA, 15 bp, Homo sapiens
tttctttcgttcctt

SEQ ID NO: 180186 - DNA, 15 bp, Homo sapiens
ttctttcgttccttt

SEQ ID NO: 180187 - DNA, 15 bp, Homo sapiens
tctttcgttcctttt

SEQ ID NO: 180188 - DNA, 15 bp, Homo sapiens
ctttcgttccttttt

SEQ ID NO: 180189 - DNA, 15 bp, Homo sapiens
tttcgttcctttttt

SEQ ID NO: 180190 - DNA, 15 bp, Homo sapiens
ttcgttccttttttg

SEQ ID NO: 180191 - DNA, 15 bp, Homo sapiens
tcgttccttttttga

SEQ ID NO: 180192 - DNA, 15 bp, Homo sapiens
cgttccttttttgaa

SEQ ID NO: 180193 - DNA, 15 bp, Homo sapiens
gttccttttttgaaa

SEQ ID NO: 180194 - DNA, 15 bp, Homo sapiens
ttccttttttgaaac

SEQ ID NO: 180195 - DNA, 15 bp, Homo sapiens
tccttttttgaaaca

SEQ ID NO: 180196 - DNA, 15 bp, Homo sapiens
ccttttttgaaacag

SEQ ID NO: 180197 - DNA, 15 bp, Homo sapiens
cttttttgaaacagg

SEQ ID NO: 180198 - DNA, 15 bp, Homo sapiens
ttttttgaaacagga

SEQ ID NO: 180199 - DNA, 15 bp, Homo sapiens
tttttgaaacaggag

SEQ ID NO: 180200 - DNA, 15 bp, Homo sapiens
ttttgaaacaggaga

SEQ ID NO: 180201 - DNA, 15 bp, Homo sapiens
tttgaaacaggagag

SEQ ID NO: 180202 - DNA, 15 bp, Homo sapiens
ttgaaacaggagagc

SEQ ID NO: 180203 - DNA, 15 bp, Homo sapiens
tgaaacaggagagca

SEQ ID NO: 180204 - DNA, 15 bp, Homo sapiens
gaaacaggagagcaa

SEQ ID NO: 180205 - DNA, 15 bp, Homo sapiens
aaacaggagagcaaa

SEQ ID NO: 180206 - DNA, 15 bp, Homo sapiens
aacaggagagcaaag

SEQ ID NO: 180207 - DNA, 15 bp, Homo sapiens
acaggagagcaaagc

SEQ ID NO: 180208 - DNA, 15 bp, Homo sapiens
caggagagcaaagca

SEQ ID NO: 180209 - DNA, 15 bp, Homo sapiens
aggagagcaaagcag

SEQ ID NO: 180210 - DNA, 15 bp, Homo sapiens
ggagagcaaagcagt

SEQ ID NO: 180211 - DNA, 15 bp, Homo sapiens
gagagcaaagcagtt

SEQ ID NO: 180212 - DNA, 15 bp, Homo sapiens
agagcaaagcagtta

SEQ ID NO: 180213 - DNA, 15 bp, Homo sapiens
gagcaaagcagttag

SEQ ID NO: 180214 - DNA, 15 bp, Homo sapiens
agcaaagcagttaga

SEQ ID NO: 180215 - DNA, 15 bp, Homo sapiens
gcaaagcagttagag

SEQ ID NO: 180216 - DNA, 15 bp, Homo sapiens
caaagcagttagagt

SEQ ID NO: 180217 - DNA, 15 bp, Homo sapiens
aaagcagttagagtt

SEQ ID NO: 180218 - DNA, 15 bp, Homo sapiens
aagcagttagagttc

SEQ ID NO: 180219 - DNA, 15 bp, Homo sapiens
agcagttagagttca

SEQ ID NO: 180220 - DNA, 15 bp, Homo sapiens
gcagttagagttcag

SEQ ID NO: 180221 - DNA, 15 bp, Homo sapiens
cagttagagttcaga

SEQ ID NO: 180222 - DNA, 15 bp, Homo sapiens
agttagagttcagag

SEQ ID NO: 180223 - DNA, 15 bp, Homo sapiens
gttagagttcagagg

SEQ ID NO: 180224 - DNA, 15 bp, Homo sapiens
ttagagttcagaggc

SEQ ID NO: 180225 - DNA, 15 bp, Homo sapiens
tagagttcagaggcc

SEQ ID NO: 180226 - DNA, 15 bp, Homo sapiens
agagttcagaggcca

SEQ ID NO: 180227 - DNA, 15 bp, Homo sapiens
gagttcagaggccag

SEQ ID NO: 180228 - DNA, 15 bp, Homo sapiens
agttcagaggccagc

SEQ ID NO: 180229 - DNA, 15 bp, Homo sapiens
gttcagaggccagcg

SEQ ID NO: 180230 - DNA, 15 bp, Homo sapiens
ttcagaggccagcgg

SEQ ID NO: 180231 - DNA, 15 bp, Homo sapiens
tcagaggccagcggc

SEQ ID NO: 180232 - DNA, 15 bp, Homo sapiens
cagaggccagcggcc

SEQ ID NO: 180233 - DNA, 15 bp, Homo sapiens
agaggccagcggcct

SEQ ID NO: 180234 - DNA, 15 bp, Homo sapiens
gaggccagcggcctc

SEQ ID NO: 180235 - DNA, 15 bp, Homo sapiens
aggccagcggcctca

SEQ ID NO: 180236 - DNA, 15 bp, Homo sapiens
ggccagcggcctcag

SEQ ID NO: 180237 - DNA, 15 bp, Homo sapiens
gccagcggcctcagg

SEQ ID NO: 180238 - DNA, 15 bp, Homo sapiens
ccagcggcctcaggg

SEQ ID NO: 180239 - DNA, 15 bp, Homo sapiens
cagcggcctcagggc

SEQ ID NO: 180240 - DNA, 15 bp, Homo sapiens
agcggcctcagggcc

SEQ ID NO: 180241 - DNA, 15 bp, Homo sapiens
gcggcctcagggcca

SEQ ID NO: 180242 - DNA, 15 bp, Homo sapiens
cggcctcagggccac

SEQ ID NO: 180243 - DNA, 15 bp, Homo sapiens
ggcctcagggccact

SEQ ID NO: 180244 - DNA, 15 bp, Homo sapiens
gcctcagggccactc

SEQ ID NO: 180245 - DNA, 15 bp, Homo sapiens
cctcagggccactcc

SEQ ID NO: 180246 - DNA, 15 bp, Homo sapiens
ctcagggccactccc

SEQ ID NO: 180247 - DNA, 15 bp, Homo sapiens
tcagggccactccct

SEQ ID NO: 180248 - DNA, 15 bp, Homo sapiens
cagggccactccctc

SEQ ID NO: 180249 - DNA, 15 bp, Homo sapiens
agggccactccctcc

SEQ ID NO: 180250 - DNA, 15 bp, Homo sapiens
gggccactccctccc

SEQ ID NO: 180251 - DNA, 15 bp, Homo sapiens
ggccactccctccct

SEQ ID NO: 180252 - DNA, 15 bp, Homo sapiens
gccactccctcccta

SEQ ID NO: 180253 - DNA, 15 bp, Homo sapiens
ccactccctccctag

SEQ ID NO: 180254 - DNA, 15 bp, Homo sapiens
cactccctccctagc

SEQ ID NO: 180255 - DNA, 15 bp, Homo sapiens
actccctccctagcc

SEQ ID NO: 180256 - DNA, 15 bp, Homo sapiens
ctccctccctagcct

SEQ ID NO: 180257 - DNA, 15 bp, Homo sapiens
tccctccctagcctt

SEQ ID NO: 180258 - DNA, 15 bp, Homo sapiens
ccctccctagccttc

SEQ ID NO: 180259 - DNA, 15 bp, Homo sapiens
cctccctagccttca

SEQ ID NO: 180260 - DNA, 15 bp, Homo sapiens
ctccctagccttcat

SEQ ID NO: 180261 - DNA, 15 bp, Homo sapiens
tccctagccttcatc

SEQ ID NO: 180262 - DNA, 15 bp, Homo sapiens
ccctagccttcatca

SEQ ID NO: 180263 - DNA, 15 bp, Homo sapiens
cctagccttcatcag

SEQ ID NO: 180264 - DNA, 15 bp, Homo sapiens
ctagccttcatcagc

SEQ ID NO: 180265 - DNA, 15 bp, Homo sapiens
tagccttcatcagca

SEQ ID NO: 180266 - DNA, 15 bp, Homo sapiens
agccttcatcagcag

SEQ ID NO: 180267 - DNA, 15 bp, Homo sapiens
gccttcatcagcaga

SEQ ID NO: 180268 - DNA, 15 bp, Homo sapiens
ccttcatcagcagag

SEQ ID NO: 180269 - DNA, 15 bp, Homo sapiens
cttcatcagcagagc

SEQ ID NO: 180270 - DNA, 15 bp, Homo sapiens
ttcatcagcagagca

SEQ ID NO: 180271 - DNA, 15 bp, Homo sapiens
tcatcagcagagcac

SEQ ID NO: 180272 - DNA, 15 bp, Homo sapiens
catcagcagagcacc

SEQ ID NO: 180273 - DNA, 15 bp, Homo sapiens
atcagcagagcaccc

SEQ ID NO: 180274 - DNA, 15 bp, Homo sapiens
tcagcagagcaccct

SEQ ID NO: 180275 - DNA, 15 bp, Homo sapiens
cagcagagcaccctc

SEQ ID NO: 180276 - DNA, 15 bp, Homo sapiens
agcagagcaccctcc

SEQ ID NO: 180277 - DNA, 15 bp, Homo sapiens
gcagagcaccctcca

SEQ ID NO: 180278 - DNA, 15 bp, Homo sapiens
cagagcaccctccat

SEQ ID NO: 180279 - DNA, 15 bp, Homo sapiens
agagcaccctccatc

SEQ ID NO: 180280 - DNA, 15 bp, Homo sapiens
gagcaccctccatcc

SEQ ID NO: 180281 - DNA, 15 bp, Homo sapiens
agcaccctccatccc

SEQ ID NO: 180282 - DNA, 15 bp, Homo sapiens
gcaccctccatcccc

SEQ ID NO: 180283 - DNA, 15 bp, Homo sapiens
caccctccatccccc

SEQ ID NO: 180284 - DNA, 15 bp, Homo sapiens
accctccatccccct

SEQ ID NO: 180285 - DNA, 15 bp, Homo sapiens
ccctccatccccctg

SEQ ID NO: 180286 - DNA, 15 bp, Homo sapiens
cctccatccccctgc

SEQ ID NO: 180287 - DNA, 15 bp, Homo sapiens
ctccatccccctgca

SEQ ID NO: 180288 - DNA, 15 bp, Homo sapiens
tccatccccctgcat

SEQ ID NO: 180289 - DNA, 15 bp, Homo sapiens
ccatccccctgcatt

SEQ ID NO: 180290 - DNA, 15 bp, Homo sapiens
catccccctgcattg

SEQ ID NO: 180291 - DNA, 15 bp, Homo sapiens
atccccctgcattgc

SEQ ID NO: 180292 - DNA, 15 bp, Homo sapiens
tccccctgcattgct

SEQ ID NO: 180293 - DNA, 15 bp, Homo sapiens
ccccctgcattgctc

SEQ ID NO: 180294 - DNA, 15 bp, Homo sapiens
cccctgcattgctct

SEQ ID NO: 180295 - DNA, 15 bp, Homo sapiens
ccctgcattgctctt

SEQ ID NO: 180296 - DNA, 15 bp, Homo sapiens
cctgcattgctcttc

SEQ ID NO: 180297 - DNA, 15 bp, Homo sapiens
ctgcattgctcttct

SEQ ID NO: 180298 - DNA, 15 bp, Homo sapiens
tgcattgctcttctg

SEQ ID NO: 180299 - DNA, 15 bp, Homo sapiens
gcattgctcttctgt

SEQ ID NO: 180300 - DNA, 15 bp, Homo sapiens
cattgctcttctgtg

SEQ ID NO: 180301 - DNA, 15 bp, Homo sapiens
attgctcttctgtga

SEQ ID NO: 180302 - DNA, 15 bp, Homo sapiens
ttgctcttctgtgaa

SEQ ID NO: 180303 - DNA, 15 bp, Homo sapiens
tgctcttctgtgaaa

SEQ ID NO: 180304 - DNA, 15 bp, Homo sapiens
gctcttctgtgaaag

SEQ ID NO: 180305 - DNA, 15 bp, Homo sapiens
ctcttctgtgaaagc

SEQ ID NO: 180306 - DNA, 15 bp, Homo sapiens
tcttctgtgaaagca

SEQ ID NO: 180307 - DNA, 15 bp, Homo sapiens
cttctgtgaaagcaa

SEQ ID NO: 180308 - DNA, 15 bp, Homo sapiens
ttctgtgaaagcaaa

SEQ ID NO: 180309 - DNA, 15 bp, Homo sapiens
tctgtgaaagcaaat

SEQ ID NO: 180310 - DNA, 15 bp, Homo sapiens
ctgtgaaagcaaata

SEQ ID NO: 180311 - DNA, 15 bp, Homo sapiens
tgtgaaagcaaatac

SEQ ID NO: 180312 - DNA, 15 bp, Homo sapiens
gtgaaagcaaatact

SEQ ID NO: 180313 - DNA, 15 bp, Homo sapiens
tgaaagcaaatacta

SEQ ID NO: 180314 - DNA, 15 bp, Homo sapiens
gaaagcaaatactaa

SEQ ID NO: 180315 - DNA, 15 bp, Homo sapiens
aaagcaaatactaaa

SEQ ID NO: 180316 - DNA, 15 bp, Homo sapiens
aagcaaatactaaag

SEQ ID NO: 180317 - DNA, 15 bp, Homo sapiens
agcaaatactaaagg

SEQ ID NO: 180318 - DNA, 15 bp, Homo sapiens
gcaaatactaaagga

SEQ ID NO: 180319 - DNA, 15 bp, Homo sapiens
caaatactaaaggat

SEQ ID NO: 180320 - DNA, 15 bp, Homo sapiens
aaatactaaaggatg

SEQ ID NO: 180321 - DNA, 15 bp, Homo sapiens
aatactaaaggatgc

SEQ ID NO: 180322 - DNA, 15 bp, Homo sapiens
atactaaaggatgcc

SEQ ID NO: 180323 - DNA, 15 bp, Homo sapiens
tactaaaggatgcca

SEQ ID NO: 180324 - DNA, 15 bp, Homo sapiens
actaaaggatgccat

SEQ ID NO: 180325 - DNA, 15 bp, Homo sapiens
ctaaaggatgccatc

SEQ ID NO: 180326 - DNA, 15 bp, Homo sapiens
taaaggatgccatcc

SEQ ID NO: 180327 - DNA, 15 bp, Homo sapiens
aaaggatgccatcct

SEQ ID NO: 180328 - DNA, 15 bp, Homo sapiens
aaggatgccatcctc

SEQ ID NO: 180329 - DNA, 15 bp, Homo sapiens
aggatgccatcctct

SEQ ID NO: 180330 - DNA, 15 bp, Homo sapiens
ggatgccatcctctg

SEQ ID NO: 180331 - DNA, 15 bp, Homo sapiens
gatgccatcctctgg

SEQ ID NO: 180332 - DNA, 15 bp, Homo sapiens
atgccatcctctgga

SEQ ID NO: 180333 - DNA, 15 bp, Homo sapiens
tgccatcctctggaa

SEQ ID NO: 180334 - DNA, 15 bp, Homo sapiens
gccatcctctggaat

SEQ ID NO: 180335 - DNA, 15 bp, Homo sapiens
ccatcctctggaatc

SEQ ID NO: 180336 - DNA, 15 bp, Homo sapiens
catcctctggaatcc

SEQ ID NO: 180337 - DNA, 15 bp, Homo sapiens
atcctctggaatcct

SEQ ID NO: 180338 - DNA, 15 bp, Homo sapiens
tcctctggaatccta

SEQ ID NO: 180339 - DNA, 15 bp, Homo sapiens
cctctggaatcctaa

SEQ ID NO: 180340 - DNA, 15 bp, Homo sapiens
ctctggaatcctaat

SEQ ID NO: 180341 - DNA, 15 bp, Homo sapiens
tctggaatcctaatg

SEQ ID NO: 180342 - DNA, 15 bp, Homo sapiens
ctggaatcctaatgg

SEQ ID NO: 180343 - DNA, 15 bp, Homo sapiens
tggaatcctaatggc

SEQ ID NO: 180344 - DNA, 15 bp, Homo sapiens
ggaatcctaatggca

SEQ ID NO: 180345 - DNA, 15 bp, Homo sapiens
gaatcctaatggcag

SEQ ID NO: 180346 - DNA, 15 bp, Homo sapiens
aatcctaatggcagg

SEQ ID NO: 180347 - DNA, 15 bp, Homo sapiens
atcctaatggcaggc

SEQ ID NO: 180348 - DNA, 15 bp, Homo sapiens
tcctaatggcaggca

SEQ ID NO: 180349 - DNA, 15 bp, Homo sapiens
cctaatggcaggcaa

SEQ ID NO: 180350 - DNA, 15 bp, Homo sapiens
ctaatggcaggcaaa

SEQ ID NO: 180351 - DNA, 15 bp, Homo sapiens
taatggcaggcaaag

SEQ ID NO: 180352 - DNA, 15 bp, Homo sapiens
aatggcaggcaaagg

SEQ ID NO: 180353 - DNA, 15 bp, Homo sapiens
atggcaggcaaaggg

SEQ ID NO: 180354 - DNA, 15 bp, Homo sapiens
tggcaggcaaaggga

SEQ ID NO: 180355 - DNA, 15 bp, Homo sapiens
ggcaggcaaagggag

SEQ ID NO: 180356 - DNA, 15 bp, Homo sapiens
gcaggcaaagggaga

SEQ ID NO: 180357 - DNA, 15 bp, Homo sapiens
caggcaaagggagag

SEQ ID NO: 180358 - DNA, 15 bp, Homo sapiens
aggcaaagggagaga

SEQ ID NO: 180359 - DNA, 15 bp, Homo sapiens
ggcaaagggagagag

SEQ ID NO: 180360 - DNA, 15 bp, Homo sapiens
gcaaagggagagagg

SEQ ID NO: 180361 - DNA, 15 bp, Homo sapiens
caaagggagagagga

SEQ ID NO: 180362 - DNA, 15 bp, Homo sapiens
aaagggagagaggaa

SEQ ID NO: 180363 - DNA, 15 bp, Homo sapiens
aagggagagaggaag

SEQ ID NO: 180364 - DNA, 15 bp, Homo sapiens
agggagagaggaagg

SEQ ID NO: 180365 - DNA, 15 bp, Homo sapiens
gggagagaggaaggg

SEQ ID NO: 180366 - DNA, 15 bp, Homo sapiens
ggagagaggaagggt

SEQ ID NO: 180367 - DNA, 15 bp, Homo sapiens
gagagaggaagggtg

SEQ ID NO: 180368 - DNA, 15 bp, Homo sapiens
agagaggaagggtga

SEQ ID NO: 180369 - DNA, 15 bp, Homo sapiens
gagaggaagggtgac

SEQ ID NO: 180370 - DNA, 15 bp, Homo sapiens
agaggaagggtgacg

SEQ ID NO: 180371 - DNA, 15 bp, Homo sapiens
gaggaagggtgacgg

SEQ ID NO: 180372 - DNA, 15 bp, Homo sapiens
aggaagggtgacggc

SEQ ID NO: 180373 - DNA, 15 bp, Homo sapiens
ggaagggtgacggct

SEQ ID NO: 180374 - DNA, 15 bp, Homo sapiens
gaagggtgacggctt

SEQ ID NO: 180375 - DNA, 15 bp, Homo sapiens
aagggtgacggcttc

SEQ ID NO: 180376 - DNA, 15 bp, Homo sapiens
agggtgacggcttct

SEQ ID NO: 180377 - DNA, 15 bp, Homo sapiens
gggtgacggcttctg

SEQ ID NO: 180378 - DNA, 15 bp, Homo sapiens
ggtgacggcttctgg

SEQ ID NO: 180379 - DNA, 15 bp, Homo sapiens
gtgacggcttctggc

SEQ ID NO: 180380 - DNA, 15 bp, Homo sapiens
tgacggcttctggca

SEQ ID NO: 180381 - DNA, 15 bp, Homo sapiens
gacggcttctggcac

SEQ ID NO: 180382 - DNA, 15 bp, Homo sapiens
acggcttctggcact

SEQ ID NO: 180383 - DNA, 15 bp, Homo sapiens
cggcttctggcactt

SEQ ID NO: 180384 - DNA, 15 bp, Homo sapiens
ggcttctggcactta

SEQ ID NO: 180385 - DNA, 15 bp, Homo sapiens
gcttctggcacttag

SEQ ID NO: 180386 - DNA, 15 bp, Homo sapiens
cttctggcacttaga

SEQ ID NO: 180387 - DNA, 15 bp, Homo sapiens
ttctggcacttagaa

SEQ ID NO: 180388 - DNA, 15 bp, Homo sapiens
tctggcacttagaaa

SEQ ID NO: 180389 - DNA, 15 bp, Homo sapiens
ctggcacttagaaaa

SEQ ID NO: 180390 - DNA, 15 bp, Homo sapiens
tggcacttagaaaac

SEQ ID NO: 180391 - DNA, 15 bp, Homo sapiens
ggcacttagaaaaca

SEQ ID NO: 180392 - DNA, 15 bp, Homo sapiens
gcacttagaaaacaa

SEQ ID NO: 180393 - DNA, 15 bp, Homo sapiens
cacttagaaaacaaa

SEQ ID NO: 180394 - DNA, 15 bp, Homo sapiens
acttagaaaacaaaa

SEQ ID NO: 180395 - DNA, 15 bp, Homo sapiens
cttagaaaacaaaaa

SEQ ID NO: 180396 - DNA, 15 bp, Homo sapiens
ttagaaaacaaaaag

SEQ ID NO: 180397 - DNA, 15 bp, Homo sapiens
tagaaaacaaaaaga

SEQ ID NO: 180398 - DNA, 15 bp, Homo sapiens
agaaaacaaaaagaa

SEQ ID NO: 180399 - DNA, 15 bp, Homo sapiens
gaaaacaaaaagaac

SEQ ID NO: 180400 - DNA, 15 bp, Homo sapiens
aaaacaaaaagaaca

SEQ ID NO: 180401 - DNA, 15 bp, Homo sapiens
aaacaaaaagaacaa

SEQ ID NO: 180402 - DNA, 15 bp, Homo sapiens
aacaaaaagaacaaa

SEQ ID NO: 180403 - DNA, 15 bp, Homo sapiens
acaaaaagaacaaaa

SEQ ID NO: 180404 - DNA, 15 bp, Homo sapiens
caaaaagaacaaaaa

SEQ ID NO: 180405 - DNA, 15 bp, Homo sapiens
aaaagaacaaaaaaa

SEQ ID NO: 180406 - DNA, 15 bp, Homo sapiens
aaagaacaaaaaaag

SEQ ID NO: 180407 - DNA, 15 bp, Homo sapiens
aagaacaaaaaaaga

SEQ ID NO: 180408 - DNA, 15 bp, Homo sapiens
agaacaaaaaaagag

SEQ ID NO: 180409 - DNA, 15 bp, Homo sapiens
gaacaaaaaaagaga

SEQ ID NO: 180410 - DNA, 15 bp, Homo sapiens
aacaaaaaaagagaa

SEQ ID NO: 180411 - DNA, 15 bp, Homo sapiens
acaaaaaaagagaaa

SEQ ID NO: 180412 - DNA, 15 bp, Homo sapiens
caaaaaaagagaaac

SEQ ID NO: 180413 - DNA, 15 bp, Homo sapiens
aaaaaaagagaaacc

SEQ ID NO: 180414 - DNA, 15 bp, Homo sapiens
aaaaaagagaaaccc

SEQ ID NO: 180415 - DNA, 15 bp, Homo sapiens
aaaaagagaaacccc

SEQ ID NO: 180416 - DNA, 15 bp, Homo sapiens
aaaagagaaaccccc

SEQ ID NO: 180417 - DNA, 15 bp, Homo sapiens
aaagagaaaccccca

SEQ ID NO: 180418 - DNA, 15 bp, Homo sapiens
aagagaaacccccaa

SEQ ID NO: 180419 - DNA, 15 bp, Homo sapiens
agagaaacccccaag

SEQ ID NO: 180420 - DNA, 15 bp, Homo sapiens
gagaaacccccaagc

SEQ ID NO: 180421 - DNA, 15 bp, Homo sapiens
agaaacccccaagcc

SEQ ID NO: 180422 - DNA, 15 bp, Homo sapiens
gaaacccccaagcct

SEQ ID NO: 180423 - DNA, 15 bp, Homo sapiens
aaacccccaagcctg

SEQ ID NO: 180424 - DNA, 15 bp, Homo sapiens
aacccccaagcctgg

SEQ ID NO: 180425 - DNA, 15 bp, Homo sapiens
acccccaagcctgga

SEQ ID NO: 180426 - DNA, 15 bp, Homo sapiens
cccccaagcctggaa

SEQ ID NO: 180427 - DNA, 15 bp, Homo sapiens
ccccaagcctggaac

SEQ ID NO: 180428 - DNA, 15 bp, Homo sapiens
cccaagcctggaacg

SEQ ID NO: 180429 - DNA, 15 bp, Homo sapiens
ccaagcctggaacgc

SEQ ID NO: 180430 - DNA, 15 bp, Homo sapiens
caagcctggaacgca

SEQ ID NO: 180431 - DNA, 15 bp, Homo sapiens
aagcctggaacgcag

SEQ ID NO: 180432 - DNA, 15 bp, Homo sapiens
agcctggaacgcaga

SEQ ID NO: 180433 - DNA, 15 bp, Homo sapiens
gcctggaacgcagag

SEQ ID NO: 180434 - DNA, 15 bp, Homo sapiens
cctggaacgcagaga

SEQ ID NO: 180435 - DNA, 15 bp, Homo sapiens
ctggaacgcagagag

SEQ ID NO: 180436 - DNA, 15 bp, Homo sapiens
tggaacgcagagagg

SEQ ID NO: 180437 - DNA, 15 bp, Homo sapiens
ggaacgcagagaggt

SEQ ID NO: 180438 - DNA, 15 bp, Homo sapiens
gaacgcagagaggtc

SEQ ID NO: 180439 - DNA, 15 bp, Homo sapiens
aacgcagagaggtct

SEQ ID NO: 180440 - DNA, 15 bp, Homo sapiens
acgcagagaggtctt

SEQ ID NO: 180441 - DNA, 15 bp, Homo sapiens
cgcagagaggtcttt

SEQ ID NO: 180442 - DNA, 15 bp, Homo sapiens
gcagagaggtcttta

SEQ ID NO: 180443 - DNA, 15 bp, Homo sapiens
cagagaggtctttac

SEQ ID NO: 180444 - DNA, 15 bp, Homo sapiens
agagaggtctttact

SEQ ID NO: 180445 - DNA, 15 bp, Homo sapiens
gagaggtctttactg

SEQ ID NO: 180446 - DNA, 15 bp, Homo sapiens
agaggtctttactgc

SEQ ID NO: 180447 - DNA, 15 bp, Homo sapiens
gaggtctttactgct

SEQ ID NO: 180448 - DNA, 15 bp, Homo sapiens
aggtctttactgctg

SEQ ID NO: 180449 - DNA, 15 bp, Homo sapiens
ggtctttactgctgg

SEQ ID NO: 180450 - DNA, 15 bp, Homo sapiens
gtctttactgctggg

SEQ ID NO: 180451 - DNA, 15 bp, Homo sapiens
tctttactgctggga

SEQ ID NO: 180452 - DNA, 15 bp, Homo sapiens
ctttactgctgggat

SEQ ID NO: 180453 - DNA, 15 bp, Homo sapiens
tttactgctgggatc

SEQ ID NO: 180454 - DNA, 15 bp, Homo sapiens
ttactgctgggatcc

SEQ ID NO: 180455 - DNA, 15 bp, Homo sapiens
tactgctgggatcca

SEQ ID NO: 180456 - DNA, 15 bp, Homo sapiens
actgctgggatccac

SEQ ID NO: 180457 - DNA, 15 bp, Homo sapiens
ctgctgggatccacg

SEQ ID NO: 180458 - DNA, 15 bp, Homo sapiens
tgctgggatccacgg

SEQ ID NO: 180459 - DNA, 15 bp, Homo sapiens
gctgggatccacgga

SEQ ID NO: 180460 - DNA, 15 bp, Homo sapiens
ctgggatccacggaa

SEQ ID NO: 180461 - DNA, 15 bp, Homo sapiens
tgggatccacggaaa

SEQ ID NO: 180462 - DNA, 15 bp, Homo sapiens
gggatccacggaaaa

SEQ ID NO: 180463 - DNA, 15 bp, Homo sapiens
ggatccacggaaaac

SEQ ID NO: 180464 - DNA, 15 bp, Homo sapiens
gatccacggaaaaca

SEQ ID NO: 180465 - DNA, 15 bp, Homo sapiens
atccacggaaaacat

SEQ ID NO: 180466 - DNA, 15 bp, Homo sapiens
tccacggaaaacatg

SEQ ID NO: 180467 - DNA, 15 bp, Homo sapiens
ccacggaaaacatgt

SEQ ID NO: 180468 - DNA, 15 bp, Homo sapiens
cacggaaaacatgtc

SEQ ID NO: 180469 - DNA, 15 bp, Homo sapiens
acggaaaacatgtct

SEQ ID NO: 180470 - DNA, 15 bp, Homo sapiens
cggaaaacatgtctg

SEQ ID NO: 180471 - DNA, 15 bp, Homo sapiens
ggaaaacatgtctgt

SEQ ID NO: 180472 - DNA, 15 bp, Homo sapiens
gaaaacatgtctgtc

SEQ ID NO: 180473 - DNA, 15 bp, Homo sapiens
aaaacatgtctgtcc

SEQ ID NO: 180474 - DNA, 15 bp, Homo sapiens
aaacatgtctgtcct

SEQ ID NO: 180475 - DNA, 15 bp, Homo sapiens
aacatgtctgtccta

SEQ ID NO: 180476 - DNA, 15 bp, Homo sapiens
acatgtctgtcctag

SEQ ID NO: 180477 - DNA, 15 bp, Homo sapiens
catgtctgtcctagc

SEQ ID NO: 180478 - DNA, 15 bp, Homo sapiens
atgtctgtcctagcc

SEQ ID NO: 180479 - DNA, 15 bp, Homo sapiens
tgtctgtcctagcca

SEQ ID NO: 180480 - DNA, 15 bp, Homo sapiens
gtctgtcctagccaa

SEQ ID NO: 180481 - DNA, 15 bp, Homo sapiens
tctgtcctagccaag

SEQ ID NO: 180482 - DNA, 15 bp, Homo sapiens
ctgtcctagccaaga

SEQ ID NO: 180483 - DNA, 15 bp, Homo sapiens
tgtcctagccaagat

SEQ ID NO: 180484 - DNA, 15 bp, Homo sapiens
gtcctagccaagatc

SEQ ID NO: 180485 - DNA, 15 bp, Homo sapiens
tcctagccaagatca

SEQ ID NO: 180486 - DNA, 15 bp, Homo sapiens
cctagccaagatcat

SEQ ID NO: 180487 - DNA, 15 bp, Homo sapiens
ctagccaagatcata

SEQ ID NO: 180488 - DNA, 15 bp, Homo sapiens
tagccaagatcatat

SEQ ID NO: 180489 - DNA, 15 bp, Homo sapiens
agccaagatcatatg

SEQ ID NO: 180490 - DNA, 15 bp, Homo sapiens
gccaagatcatatga

SEQ ID NO: 180491 - DNA, 15 bp, Homo sapiens
ccaagatcatatgaa

SEQ ID NO: 180492 - DNA, 15 bp, Homo sapiens
caagatcatatgaag

SEQ ID NO: 180493 - DNA, 15 bp, Homo sapiens
aagatcatatgaaga

SEQ ID NO: 180494 - DNA, 15 bp, Homo sapiens
agatcatatgaagag

SEQ ID NO: 180495 - DNA, 15 bp, Homo sapiens
gatcatatgaagagt

SEQ ID NO: 180496 - DNA, 15 bp, Homo sapiens
atcatatgaagagtt

SEQ ID NO: 180497 - DNA, 15 bp, Homo sapiens
tcatatgaagagttt

SEQ ID NO: 180498 - DNA, 15 bp, Homo sapiens
catatgaagagtttg

SEQ ID NO: 180499 - DNA, 15 bp, Homo sapiens
atatgaagagtttgg

SEQ ID NO: 180500 - DNA, 15 bp, Homo sapiens
tatgaagagtttggc

SEQ ID NO: 180501 - DNA, 15 bp, Homo sapiens
atgaagagtttggca

SEQ ID NO: 180502 - DNA, 15 bp, Homo sapiens
tgaagagtttggcac

SEQ ID NO: 180503 - DNA, 15 bp, Homo sapiens
gaagagtttggcacg

SEQ ID NO: 180504 - DNA, 15 bp, Homo sapiens
aagagtttggcacgg

SEQ ID NO: 180505 - DNA, 15 bp, Homo sapiens
agagtttggcacgga

SEQ ID NO: 180506 - DNA, 15 bp, Homo sapiens
gagtttggcacggag

SEQ ID NO: 180507 - DNA, 15 bp, Homo sapiens
agtttggcacggagg

SEQ ID NO: 180508 - DNA, 15 bp, Homo sapiens
gtttggcacggaggc

SEQ ID NO: 180509 - DNA, 15 bp, Homo sapiens
tttggcacggaggct

SEQ ID NO: 180510 - DNA, 15 bp, Homo sapiens
ttggcacggaggctg

SEQ ID NO: 180511 - DNA, 15 bp, Homo sapiens
tggcacggaggctga

SEQ ID NO: 180512 - DNA, 15 bp, Homo sapiens
ggcacggaggctgag

SEQ ID NO: 180513 - DNA, 15 bp, Homo sapiens
gcacggaggctgaga

SEQ ID NO: 180514 - DNA, 15 bp, Homo sapiens
cacggaggctgagaa

SEQ ID NO: 180515 - DNA, 15 bp, Homo sapiens
acggaggctgagaat

SEQ ID NO: 180516 - DNA, 15 bp, Homo sapiens
cggaggctgagaatg

SEQ ID NO: 180517 - DNA, 15 bp, Homo sapiens
ggaggctgagaatga

SEQ ID NO: 180518 - DNA, 15 bp, Homo sapiens
gaggctgagaatgac

SEQ ID NO: 180519 - DNA, 15 bp, Homo sapiens
aggctgagaatgacc

SEQ ID NO: 180520 - DNA, 15 bp, Homo sapiens
ggctgagaatgacct

SEQ ID NO: 180521 - DNA, 15 bp, Homo sapiens
gctgagaatgacctg

SEQ ID NO: 180522 - DNA, 15 bp, Homo sapiens
ctgagaatgacctgg

SEQ ID NO: 180523 - DNA, 15 bp, Homo sapiens
tgagaatgacctggc

SEQ ID NO: 180524 - DNA, 15 bp, Homo sapiens
gagaatgacctggca

SEQ ID NO: 180525 - DNA, 15 bp, Homo sapiens
agaatgacctggcat

SEQ ID NO: 180526 - DNA, 15 bp, Homo sapiens
gaatgacctggcata

SEQ ID NO: 180527 - DNA, 15 bp, Homo sapiens
aatgacctggcatag

SEQ ID NO: 180528 - DNA, 15 bp, Homo sapiens
atgacctggcataga

SEQ ID NO: 180529 - DNA, 15 bp, Homo sapiens
tgacctggcatagat

SEQ ID NO: 180530 - DNA, 15 bp, Homo sapiens
gacctggcatagatg

SEQ ID NO: 180531 - DNA, 15 bp, Homo sapiens
acctggcatagatgg

SEQ ID NO: 180532 - DNA, 15 bp, Homo sapiens
cctggcatagatggt

SEQ ID NO: 180533 - DNA, 15 bp, Homo sapiens
ctggcatagatggtt

SEQ ID NO: 180534 - DNA, 15 bp, Homo sapiens
tggcatagatggttt

SEQ ID NO: 180535 - DNA, 15 bp, Homo sapiens
ggcatagatggtttg

SEQ ID NO: 180536 - DNA, 15 bp, Homo sapiens
gcatagatggtttgc

SEQ ID NO: 180537 - DNA, 15 bp, Homo sapiens
catagatggtttgcc

SEQ ID NO: 180538 - DNA, 15 bp, Homo sapiens
atagatggtttgcca

SEQ ID NO: 180539 - DNA, 15 bp, Homo sapiens
tagatggtttgccag

SEQ ID NO: 180540 - DNA, 15 bp, Homo sapiens
agatggtttgccagt

SEQ ID NO: 180541 - DNA, 15 bp, Homo sapiens
gatggtttgccagtt

SEQ ID NO: 180542 - DNA, 15 bp, Homo sapiens
atggtttgccagtta

SEQ ID NO: 180543 - DNA, 15 bp, Homo sapiens
tggtttgccagttag

SEQ ID NO: 180544 - DNA, 15 bp, Homo sapiens
ggtttgccagttagg

SEQ ID NO: 180545 - DNA, 15 bp, Homo sapiens
gtttgccagttagga

SEQ ID NO: 180546 - DNA, 15 bp, Homo sapiens
tttgccagttaggat

SEQ ID NO: 180547 - DNA, 15 bp, Homo sapiens
ttgccagttaggatg

SEQ ID NO: 180548 - DNA, 15 bp, Homo sapiens
tgccagttaggatgt

SEQ ID NO: 180549 - DNA, 15 bp, Homo sapiens
gccagttaggatgtc

SEQ ID NO: 180550 - DNA, 15 bp, Homo sapiens
ccagttaggatgtct

SEQ ID NO: 180551 - DNA, 15 bp, Homo sapiens
cagttaggatgtctc

SEQ ID NO: 180552 - DNA, 15 bp, Homo sapiens
agttaggatgtctca

SEQ ID NO: 180553 - DNA, 15 bp, Homo sapiens
gttaggatgtctcaa

SEQ ID NO: 180554 - DNA, 15 bp, Homo sapiens
ttaggatgtctcaat

SEQ ID NO: 180555 - DNA, 15 bp, Homo sapiens
taggatgtctcaatt

SEQ ID NO: 180556 - DNA, 15 bp, Homo sapiens
aggatgtctcaattt

SEQ ID NO: 180557 - DNA, 15 bp, Homo sapiens
ggatgtctcaatttg

SEQ ID NO: 180558 - DNA, 15 bp, Homo sapiens
gatgtctcaatttga

SEQ ID NO: 180559 - DNA, 15 bp, Homo sapiens
atgtctcaatttgag

SEQ ID NO: 180560 - DNA, 15 bp, Homo sapiens
tgtctcaatttgagc

SEQ ID NO: 180561 - DNA, 15 bp, Homo sapiens
gtctcaatttgagcc

SEQ ID NO: 180562 - DNA, 15 bp, Homo sapiens
tctcaatttgagcct

SEQ ID NO: 180563 - DNA, 15 bp, Homo sapiens
ctcaatttgagcctt

SEQ ID NO: 180564 - DNA, 15 bp, Homo sapiens
tcaatttgagccttt

SEQ ID NO: 180565 - DNA, 15 bp, Homo sapiens
caatttgagcctttg

SEQ ID NO: 180566 - DNA, 15 bp, Homo sapiens
aatttgagcctttgc

SEQ ID NO: 180567 - DNA, 15 bp, Homo sapiens
atttgagcctttgct

SEQ ID NO: 180568 - DNA, 15 bp, Homo sapiens
tttgagcctttgctt

SEQ ID NO: 180569 - DNA, 15 bp, Homo sapiens
ttgagcctttgcttt

SEQ ID NO: 180570 - DNA, 15 bp, Homo sapiens
tgagcctttgctttt

SEQ ID NO: 180571 - DNA, 15 bp, Homo sapiens
gagcctttgcttttg

SEQ ID NO: 180572 - DNA, 15 bp, Homo sapiens
agcctttgcttttgg

SEQ ID NO: 180573 - DNA, 15 bp, Homo sapiens
gcctttgcttttggt

SEQ ID NO: 180574 - DNA, 15 bp, Homo sapiens
cctttgcttttggtg

SEQ ID NO: 180575 - DNA, 15 bp, Homo sapiens
ctttgcttttggtgg

SEQ ID NO: 180576 - DNA, 15 bp, Homo sapiens
tttgcttttggtgga

SEQ ID NO: 180577 - DNA, 15 bp, Homo sapiens
ttgcttttggtggat

SEQ ID NO: 180578 - DNA, 15 bp, Homo sapiens
tgcttttggtggata

SEQ ID NO: 180579 - DNA, 15 bp, Homo sapiens
gcttttggtggataa

SEQ ID NO: 180580 - DNA, 15 bp, Homo sapiens
cttttggtggataac

SEQ ID NO: 180581 - DNA, 15 bp, Homo sapiens
ttttggtggataact

SEQ ID NO: 180582 - DNA, 15 bp, Homo sapiens
tttggtggataactc

SEQ ID NO: 180583 - DNA, 15 bp, Homo sapiens
ttggtggataactca

SEQ ID NO: 180584 - DNA, 15 bp, Homo sapiens
tggtggataactcag

SEQ ID NO: 180585 - DNA, 15 bp, Homo sapiens
ggtggataactcagc

SEQ ID NO: 180586 - DNA, 15 bp, Homo sapiens
gtggataactcagct

SEQ ID NO: 180587 - DNA, 15 bp, Homo sapiens
tggataactcagctc

SEQ ID NO: 180588 - DNA, 15 bp, Homo sapiens
ggataactcagctcc

SEQ ID NO: 180589 - DNA, 15 bp, Homo sapiens
gataactcagctccc

SEQ ID NO: 180590 - DNA, 15 bp, Homo sapiens
ataactcagctcccc

SEQ ID NO: 180591 - DNA, 15 bp, Homo sapiens
taactcagctcccct

SEQ ID NO: 180592 - DNA, 15 bp, Homo sapiens
aactcagctcccctc

SEQ ID NO: 180593 - DNA, 15 bp, Homo sapiens
actcagctcccctct

SEQ ID NO: 180594 - DNA, 15 bp, Homo sapiens
ctcagctcccctctt

SEQ ID NO: 180595 - DNA, 15 bp, Homo sapiens
tcagctcccctcttg

SEQ ID NO: 180596 - DNA, 15 bp, Homo sapiens
cagctcccctcttgt

SEQ ID NO: 180597 - DNA, 15 bp, Homo sapiens
agctcccctcttgta

SEQ ID NO: 180598 - DNA, 15 bp, Homo sapiens
gctcccctcttgtaa

SEQ ID NO: 180599 - DNA, 15 bp, Homo sapiens
ctcccctcttgtaac

SEQ ID NO: 180600 - DNA, 15 bp, Homo sapiens
tcccctcttgtaacc

SEQ ID NO: 180601 - DNA, 15 bp, Homo sapiens
cccctcttgtaacct

SEQ ID NO: 180602 - DNA, 15 bp, Homo sapiens
ccctcttgtaacctg

SEQ ID NO: 180603 - DNA, 15 bp, Homo sapiens
cctcttgtaacctgg

SEQ ID NO: 180604 - DNA, 15 bp, Homo sapiens
ctcttgtaacctgga

SEQ ID NO: 180605 - DNA, 15 bp, Homo sapiens
tcttgtaacctggaa

SEQ ID NO: 180606 - DNA, 15 bp, Homo sapiens
cttgtaacctggaaa

SEQ ID NO: 180607 - DNA, 15 bp, Homo sapiens
ttgtaacctggaaag

SEQ ID NO: 180608 - DNA, 15 bp, Homo sapiens
tgtaacctggaaagt

SEQ ID NO: 180609 - DNA, 15 bp, Homo sapiens
gtaacctggaaagtt

SEQ ID NO: 180610 - DNA, 15 bp, Homo sapiens
taacctggaaagttg

SEQ ID NO: 180611 - DNA, 15 bp, Homo sapiens
aacctggaaagttgg

SEQ ID NO: 180612 - DNA, 15 bp, Homo sapiens
acctggaaagttggt

SEQ ID NO: 180613 - DNA, 15 bp, Homo sapiens
cctggaaagttggtt

SEQ ID NO: 180614 - DNA, 15 bp, Homo sapiens
ctggaaagttggttg

SEQ ID NO: 180615 - DNA, 15 bp, Homo sapiens
tggaaagttggttgc

SEQ ID NO: 180616 - DNA, 15 bp, Homo sapiens
ggaaagttggttgcc

SEQ ID NO: 180617 - DNA, 15 bp, Homo sapiens
gaaagttggttgcct

SEQ ID NO: 180618 - DNA, 15 bp, Homo sapiens
aaagttggttgcctt

SEQ ID NO: 180619 - DNA, 15 bp, Homo sapiens
aagttggttgccttt

SEQ ID NO: 180620 - DNA, 15 bp, Homo sapiens
agttggttgccttta

SEQ ID NO: 180621 - DNA, 15 bp, Homo sapiens
gttggttgcctttat

SEQ ID NO: 180622 - DNA, 15 bp, Homo sapiens
ttggttgcctttatc

SEQ ID NO: 180623 - DNA, 15 bp, Homo sapiens
tggttgcctttatca

SEQ ID NO: 180624 - DNA, 15 bp, Homo sapiens
ggttgcctttatcat

SEQ ID NO: 180625 - DNA, 15 bp, Homo sapiens
gttgcctttatcatc

SEQ ID NO: 180626 - DNA, 15 bp, Homo sapiens
ttgcctttatcatcc

SEQ ID NO: 180627 - DNA, 15 bp, Homo sapiens
tgcctttatcatcct

SEQ ID NO: 180628 - DNA, 15 bp, Homo sapiens
gcctttatcatcctg

SEQ ID NO: 180629 - DNA, 15 bp, Homo sapiens
cctttatcatcctgc

SEQ ID NO: 180630 - DNA, 15 bp, Homo sapiens
ctttatcatcctgct

SEQ ID NO: 180631 - DNA, 15 bp, Homo sapiens
tttatcatcctgctg

SEQ ID NO: 180632 - DNA, 15 bp, Homo sapiens
ttatcatcctgctgg

SEQ ID NO: 180633 - DNA, 15 bp, Homo sapiens
tatcatcctgctggt

SEQ ID NO: 180634 - DNA, 15 bp, Homo sapiens
atcatcctgctggtt

SEQ ID NO: 180635 - DNA, 15 bp, Homo sapiens
tcatcctgctggttt

SEQ ID NO: 180636 - DNA, 15 bp, Homo sapiens
catcctgctggtttt

SEQ ID NO: 180637 - DNA, 15 bp, Homo sapiens
atcctgctggtttta

SEQ ID NO: 180638 - DNA, 15 bp, Homo sapiens
tcctgctggttttat

SEQ ID NO: 180639 - DNA, 15 bp, Homo sapiens
cctgctggttttatc

SEQ ID NO: 180640 - DNA, 15 bp, Homo sapiens
ctgctggttttatcc

SEQ ID NO: 180641 - DNA, 15 bp, Homo sapiens
tgctggttttatcca

SEQ ID NO: 180642 - DNA, 15 bp, Homo sapiens
gctggttttatccat

SEQ ID NO: 180643 - DNA, 15 bp, Homo sapiens
ctggttttatccatg

SEQ ID NO: 180644 - DNA, 15 bp, Homo sapiens
tggttttatccatgg

SEQ ID NO: 180645 - DNA, 15 bp, Homo sapiens
ggttttatccatgga

SEQ ID NO: 180646 - DNA, 15 bp, Homo sapiens
gttttatccatggac

SEQ ID NO: 180647 - DNA, 15 bp, Homo sapiens
ttttatccatggact

SEQ ID NO: 180648 - DNA, 15 bp, Homo sapiens
tttatccatggactg

SEQ ID NO: 180649 - DNA, 15 bp, Homo sapiens
ttatccatggactga

SEQ ID NO: 180650 - DNA, 15 bp, Homo sapiens
tatccatggactgaa

SEQ ID NO: 180651 - DNA, 15 bp, Homo sapiens
atccatggactgaac

SEQ ID NO: 180652 - DNA, 15 bp, Homo sapiens
tccatggactgaaca

SEQ ID NO: 180653 - DNA, 15 bp, Homo sapiens
ccatggactgaacac

SEQ ID NO: 180654 - DNA, 15 bp, Homo sapiens
catggactgaacacc

SEQ ID NO: 180655 - DNA, 15 bp, Homo sapiens
atggactgaacaccc

SEQ ID NO: 180656 - DNA, 15 bp, Homo sapiens
tggactgaacaccca

SEQ ID NO: 180657 - DNA, 15 bp, Homo sapiens
ggactgaacacccaa

SEQ ID NO: 180658 - DNA, 15 bp, Homo sapiens
gactgaacacccaac

SEQ ID NO: 180659 - DNA, 15 bp, Homo sapiens
actgaacacccaaca

SEQ ID NO: 180660 - DNA, 15 bp, Homo sapiens
ctgaacacccaacag

SEQ ID NO: 180661 - DNA, 15 bp, Homo sapiens
tgaacacccaacagc

SEQ ID NO: 180662 - DNA, 15 bp, Homo sapiens
gaacacccaacagca

SEQ ID NO: 180663 - DNA, 15 bp, Homo sapiens
aacacccaacagcag

SEQ ID NO: 180664 - DNA, 15 bp, Homo sapiens
acacccaacagcagt

SEQ ID NO: 180665 - DNA, 15 bp, Homo sapiens
cacccaacagcagtg

SEQ ID NO: 180666 - DNA, 15 bp, Homo sapiens
acccaacagcagtgc

SEQ ID NO: 180667 - DNA, 15 bp, Homo sapiens
cccaacagcagtgca

SEQ ID NO: 180668 - DNA, 15 bp, Homo sapiens
ccaacagcagtgcac

SEQ ID NO: 180669 - DNA, 15 bp, Homo sapiens
caacagcagtgcact

SEQ ID NO: 180670 - DNA, 15 bp, Homo sapiens
aacagcagtgcacta

SEQ ID NO: 180671 - DNA, 15 bp, Homo sapiens
acagcagtgcactat

SEQ ID NO: 180672 - DNA, 15 bp, Homo sapiens
cagcagtgcactatg

SEQ ID NO: 180673 - DNA, 15 bp, Homo sapiens
agcagtgcactatgc

SEQ ID NO: 180674 - DNA, 15 bp, Homo sapiens
gcagtgcactatgct

SEQ ID NO: 180675 - DNA, 15 bp, Homo sapiens
cagtgcactatgctt

SEQ ID NO: 180676 - DNA, 15 bp, Homo sapiens
agtgcactatgcttt

SEQ ID NO: 180677 - DNA, 15 bp, Homo sapiens
gtgcactatgctttc

SEQ ID NO: 180678 - DNA, 15 bp, Homo sapiens
tgcactatgctttct

SEQ ID NO: 180679 - DNA, 15 bp, Homo sapiens
gcactatgctttcta

SEQ ID NO: 180680 - DNA, 15 bp, Homo sapiens
cactatgctttctat

SEQ ID NO: 180681 - DNA, 15 bp, Homo sapiens
actatgctttctatg

SEQ ID NO: 180682 - DNA, 15 bp, Homo sapiens
ctatgctttctatgg

SEQ ID NO: 180683 - DNA, 15 bp, Homo sapiens
tatgctttctatggc

SEQ ID NO: 180684 - DNA, 15 bp, Homo sapiens
atgctttctatggca

SEQ ID NO: 180685 - DNA, 15 bp, Homo sapiens
tgctttctatggcat

SEQ ID NO: 180686 - DNA, 15 bp, Homo sapiens
gctttctatggcatc

SEQ ID NO: 180687 - DNA, 15 bp, Homo sapiens
ctttctatggcatct

SEQ ID NO: 180688 - DNA, 15 bp, Homo sapiens
tttctatggcatctt

SEQ ID NO: 180689 - DNA, 15 bp, Homo sapiens
ttctatggcatcttt

SEQ ID NO: 180690 - DNA, 15 bp, Homo sapiens
tctatggcatctttc

SEQ ID NO: 180691 - DNA, 15 bp, Homo sapiens
ctatggcatctttca

SEQ ID NO: 180692 - DNA, 15 bp, Homo sapiens
tatggcatctttcat

SEQ ID NO: 180693 - DNA, 15 bp, Homo sapiens
atggcatctttcatt

SEQ ID NO: 180694 - DNA, 15 bp, Homo sapiens
tggcatctttcattc

SEQ ID NO: 180695 - DNA, 15 bp, Homo sapiens
ggcatctttcattct

SEQ ID NO: 180696 - DNA, 15 bp, Homo sapiens
gcatctttcattctc

SEQ ID NO: 180697 - DNA, 15 bp, Homo sapiens
catctttcattctca

SEQ ID NO: 180698 - DNA, 15 bp, Homo sapiens
atctttcattctcat

SEQ ID NO: 180699 - DNA, 15 bp, Homo sapiens
tctttcattctcatt

SEQ ID NO: 180700 - DNA, 15 bp, Homo sapiens
ctttcattctcattt

SEQ ID NO: 180701 - DNA, 15 bp, Homo sapiens
tttcattctcatttt

SEQ ID NO: 180702 - DNA, 15 bp, Homo sapiens
ttcattctcatttta

SEQ ID NO: 180703 - DNA, 15 bp, Homo sapiens
tcattctcattttat

SEQ ID NO: 180704 - DNA, 15 bp, Homo sapiens
cattctcattttata

SEQ ID NO: 180705 - DNA, 15 bp, Homo sapiens
attctcattttatat

SEQ ID NO: 180706 - DNA, 15 bp, Homo sapiens
ttctcattttatatt

SEQ ID NO: 180707 - DNA, 15 bp, Homo sapiens
tctcattttatattg

SEQ ID NO: 180708 - DNA, 15 bp, Homo sapiens
ctcattttatattgt

SEQ ID NO: 180709 - DNA, 15 bp, Homo sapiens
tcattttatattgtg

SEQ ID NO: 180710 - DNA, 15 bp, Homo sapiens
cattttatattgtgc

SEQ ID NO: 180711 - DNA, 15 bp, Homo sapiens
attttatattgtgct

SEQ ID NO: 180712 - DNA, 15 bp, Homo sapiens
ttttatattgtgcta

SEQ ID NO: 180713 - DNA, 15 bp, Homo sapiens
tttatattgtgctat

SEQ ID NO: 180714 - DNA, 15 bp, Homo sapiens
ttatattgtgctata

SEQ ID NO: 180715 - DNA, 15 bp, Homo sapiens
tatattgtgctataa

SEQ ID NO: 180716 - DNA, 15 bp, Homo sapiens
atattgtgctataaa

SEQ ID NO: 180717 - DNA, 15 bp, Homo sapiens
tattgtgctataaaa

SEQ ID NO: 180718 - DNA, 15 bp, Homo sapiens
attgtgctataaaaa

SEQ ID NO: 180719 - DNA, 15 bp, Homo sapiens
ttgtgctataaaaag

SEQ ID NO: 180720 - DNA, 15 bp, Homo sapiens
tgtgctataaaaagg

SEQ ID NO: 180721 - DNA, 15 bp, Homo sapiens
gtgctataaaaagga

SEQ ID NO: 180722 - DNA, 15 bp, Homo sapiens
tgctataaaaaggat

SEQ ID NO: 180723 - DNA, 15 bp, Homo sapiens
gctataaaaaggatt

SEQ ID NO: 180724 - DNA, 15 bp, Homo sapiens
ctataaaaaggattg

SEQ ID NO: 180725 - DNA, 15 bp, Homo sapiens
tataaaaaggattgt

SEQ ID NO: 180726 - DNA, 15 bp, Homo sapiens
ataaaaaggattgtt

SEQ ID NO: 180727 - DNA, 15 bp, Homo sapiens
taaaaaggattgttt

SEQ ID NO: 180728 - DNA, 15 bp, Homo sapiens
aaaaaggattgtttc

SEQ ID NO: 180729 - DNA, 15 bp, Homo sapiens
aaaaggattgtttct

SEQ ID NO: 180730 - DNA, 15 bp, Homo sapiens
aaaggattgtttctc

SEQ ID NO: 180731 - DNA, 15 bp, Homo sapiens
aaggattgtttctcc

SEQ ID NO: 180732 - DNA, 15 bp, Homo sapiens
aggattgtttctcca

SEQ ID NO: 180733 - DNA, 15 bp, Homo sapiens
ggattgtttctccat

SEQ ID NO: 180734 - DNA, 15 bp, Homo sapiens
gattgtttctccata

SEQ ID NO: 180735 - DNA, 15 bp, Homo sapiens
attgtttctccatat

SEQ ID NO: 180736 - DNA, 15 bp, Homo sapiens
ttgtttctccatata

SEQ ID NO: 180737 - DNA, 15 bp, Homo sapiens
tgtttctccatatat

SEQ ID NO: 180738 - DNA, 15 bp, Homo sapiens
gtttctccatatata

SEQ ID NO: 180739 - DNA, 15 bp, Homo sapiens
tttctccatatatat

SEQ ID NO: 180740 - DNA, 15 bp, Homo sapiens
ttctccatatatata

SEQ ID NO: 180741 - DNA, 15 bp, Homo sapiens
tctccatatatatat

SEQ ID NO: 180742 - DNA, 15 bp, Homo sapiens
ctccatatatatatt

SEQ ID NO: 180743 - DNA, 15 bp, Homo sapiens
tccatatatatatta

SEQ ID NO: 180744 - DNA, 15 bp, Homo sapiens
ccatatatatattat

SEQ ID NO: 180745 - DNA, 15 bp, Homo sapiens
tatatattatatatg

SEQ ID NO: 180746 - DNA, 15 bp, Homo sapiens
atatattatatatgt

SEQ ID NO: 180747 - DNA, 15 bp, Homo sapiens
tatattatatatgtg

SEQ ID NO: 180748 - DNA, 15 bp, Homo sapiens
atattatatatgtgt

SEQ ID NO: 180749 - DNA, 15 bp, Homo sapiens
tattatatatgtgtg

SEQ ID NO: 180750 - DNA, 15 bp, Homo sapiens
attatatatgtgtgt

SEQ ID NO: 180751 - DNA, 15 bp, Homo sapiens
ttatatatgtgtgta

SEQ ID NO: 180752 - DNA, 15 bp, Homo sapiens
tatatatgtgtgtat

SEQ ID NO: 180753 - DNA, 15 bp, Homo sapiens
atatatgtgtgtata

SEQ ID NO: 180754 - DNA, 15 bp, Homo sapiens
tatatgtgtgtatat

SEQ ID NO: 180755 - DNA, 15 bp, Homo sapiens
atatgtgtgtatata

SEQ ID NO: 180756 - DNA, 15 bp, Homo sapiens
tatgtgtgtatatat

SEQ ID NO: 180757 - DNA, 15 bp, Homo sapiens
atgtgtgtatatata

SEQ ID NO: 180758 - DNA, 15 bp, Homo sapiens
tgtgtgtatatatat

SEQ ID NO: 180759 - DNA, 15 bp, Homo sapiens
gtgtgtatatatata

SEQ ID NO: 180760 - DNA, 15 bp, Homo sapiens
tgtgtatatatataa

SEQ ID NO: 180761 - DNA, 15 bp, Homo sapiens
gtgtatatatataat

SEQ ID NO: 180762 - DNA, 15 bp, Homo sapiens
tgtatatatataata

SEQ ID NO: 180763 - DNA, 15 bp, Homo sapiens
gtatatatataatat

SEQ ID NO: 180764 - DNA, 15 bp, Homo sapiens
atatatataatataa

SEQ ID NO: 180765 - DNA, 15 bp, Homo sapiens
tatatataatataat

SEQ ID NO: 180766 - DNA, 15 bp, Homo sapiens
atatataatataata

SEQ ID NO: 180767 - DNA, 15 bp, Homo sapiens
tatataatataatat

SEQ ID NO: 180768 - DNA, 15 bp, Homo sapiens
atataatataatata

SEQ ID NO: 180769 - DNA, 15 bp, Homo sapiens
tataatataatatat

SEQ ID NO: 180770 - DNA, 15 bp, Homo sapiens
ataatataatatatg

SEQ ID NO: 180771 - DNA, 15 bp, Homo sapiens
taatataatatatgt

SEQ ID NO: 180772 - DNA, 15 bp, Homo sapiens
aatataatatatgtg

SEQ ID NO: 180773 - DNA, 15 bp, Homo sapiens
atataatatatgtgt

SEQ ID NO: 180774 - DNA, 15 bp, Homo sapiens
tataatatatgtgta

SEQ ID NO: 180775 - DNA, 15 bp, Homo sapiens
ataatatatgtgtat

SEQ ID NO: 180776 - DNA, 15 bp, Homo sapiens
taatatatgtgtata

SEQ ID NO: 180777 - DNA, 15 bp, Homo sapiens
aatatatgtgtatat

SEQ ID NO: 180778 - DNA, 15 bp, Homo sapiens
atatatgtgtatata

SEQ ID NO: 180779 - DNA, 15 bp, Homo sapiens
tatatgtgtatatat

SEQ ID NO: 180780 - DNA, 15 bp, Homo sapiens
atatgtgtatatata

SEQ ID NO: 180781 - DNA, 15 bp, Homo sapiens
tatgtgtatatatat

SEQ ID NO: 180782 - DNA, 15 bp, Homo sapiens
atgtgtatatatata

SEQ ID NO: 180783 - DNA, 15 bp, Homo sapiens
tgtgtatatatatat

SEQ ID NO: 180784 - DNA, 15 bp, Homo sapiens
gtgtatatatatatt

SEQ ID NO: 180785 - DNA, 15 bp, Homo sapiens
tgtatatatatatta

SEQ ID NO: 180786 - DNA, 15 bp, Homo sapiens
gtatatatatattat

SEQ ID NO: 180787 - DNA, 15 bp, Homo sapiens
atatataatatataa

SEQ ID NO: 180788 - DNA, 15 bp, Homo sapiens
tatataatatataat

SEQ ID NO: 180789 - DNA, 15 bp, Homo sapiens
atataatatataata

SEQ ID NO: 180790 - DNA, 15 bp, Homo sapiens
tataatatataatat

SEQ ID NO: 180791 - DNA, 15 bp, Homo sapiens
ataatatataatata

SEQ ID NO: 180792 - DNA, 15 bp, Homo sapiens
taatatataatataa

SEQ ID NO: 180793 - DNA, 15 bp, Homo sapiens
aatatataatataat

SEQ ID NO: 180794 - DNA, 15 bp, Homo sapiens
ataatataatatatt

SEQ ID NO: 180795 - DNA, 15 bp, Homo sapiens
taatataatatatta

SEQ ID NO: 180796 - DNA, 15 bp, Homo sapiens
aatataatatattat

SEQ ID NO: 180797 - DNA, 15 bp, Homo sapiens
ataatatattatata

SEQ ID NO: 180798 - DNA, 15 bp, Homo sapiens
taatatattatatat

SEQ ID NO: 180799 - DNA, 15 bp, Homo sapiens
aatatattatatata

SEQ ID NO: 180800 - DNA, 15 bp, Homo sapiens
atattatatatatat

SEQ ID NO: 180801 - DNA, 15 bp, Homo sapiens
tattatatatatatt

SEQ ID NO: 180802 - DNA, 15 bp, Homo sapiens
attatatatatatta

SEQ ID NO: 180803 - DNA, 15 bp, Homo sapiens
taatatatatataaa

SEQ ID NO: 180804 - DNA, 15 bp, Homo sapiens
aatatatatataaaa

SEQ ID NO: 180805 - DNA, 15 bp, Homo sapiens
atatatatataaaat

SEQ ID NO: 180806 - DNA, 15 bp, Homo sapiens
tatatatataaaata

SEQ ID NO: 180807 - DNA, 15 bp, Homo sapiens
atatatataaaatat

SEQ ID NO: 180808 - DNA, 15 bp, Homo sapiens
tatatataaaatata

SEQ ID NO: 180809 - DNA, 15 bp, Homo sapiens
atatataaaatatat

SEQ ID NO: 180810 - DNA, 15 bp, Homo sapiens
tatataaaatatata

SEQ ID NO: 180811 - DNA, 15 bp, Homo sapiens
atataaaatatatat

SEQ ID NO: 180812 - DNA, 15 bp, Homo sapiens
tataaaatatatata

SEQ ID NO: 180813 - DNA, 15 bp, Homo sapiens
tatatatatatatgc

SEQ ID NO: 180814 - DNA, 15 bp, Homo sapiens
atatatatatatgct

SEQ ID NO: 180815 - DNA, 15 bp, Homo sapiens
tatatatatatgctc

SEQ ID NO: 180816 - DNA, 15 bp, Homo sapiens
atatatatatgctct

SEQ ID NO: 180817 - DNA, 15 bp, Homo sapiens
tatatatatgctctc

SEQ ID NO: 180818 - DNA, 15 bp, Homo sapiens
atatatatgctctcc

SEQ ID NO: 180819 - DNA, 15 bp, Homo sapiens
tatatatgctctcct

SEQ ID NO: 180820 - DNA, 15 bp, Homo sapiens
atatatgctctcctc

SEQ ID NO: 180821 - DNA, 15 bp, Homo sapiens
tatatgctctcctct

SEQ ID NO: 180822 - DNA, 15 bp, Homo sapiens
atatgctctcctctt

SEQ ID NO: 180823 - DNA, 15 bp, Homo sapiens
tatgctctcctcttt

SEQ ID NO: 180824 - DNA, 15 bp, Homo sapiens
atgctctcctctttc

SEQ ID NO: 180825 - DNA, 15 bp, Homo sapiens
tgctctcctctttca

SEQ ID NO: 180826 - DNA, 15 bp, Homo sapiens
gctctcctctttcag

SEQ ID NO: 180827 - DNA, 15 bp, Homo sapiens
ctctcctctttcagc

SEQ ID NO: 180828 - DNA, 15 bp, Homo sapiens
tctcctctttcagcc

SEQ ID NO: 180829 - DNA, 15 bp, Homo sapiens
ctcctctttcagcct

SEQ ID NO: 180830 - DNA, 15 bp, Homo sapiens
tcctctttcagcctc

SEQ ID NO: 180831 - DNA, 15 bp, Homo sapiens
cctctttcagcctct

SEQ ID NO: 180832 - DNA, 15 bp, Homo sapiens
ctctttcagcctctt

SEQ ID NO: 180833 - DNA, 15 bp, Homo sapiens
tctttcagcctcttt

SEQ ID NO: 180834 - DNA, 15 bp, Homo sapiens
ctttcagcctctttg

SEQ ID NO: 180835 - DNA, 15 bp, Homo sapiens
tttcagcctctttgt

SEQ ID NO: 180836 - DNA, 15 bp, Homo sapiens
ttcagcctctttgtc

SEQ ID NO: 180837 - DNA, 15 bp, Homo sapiens
tcagcctctttgtca

SEQ ID NO: 180838 - DNA, 15 bp, Homo sapiens
cagcctctttgtcac

SEQ ID NO: 180839 - DNA, 15 bp, Homo sapiens
agcctctttgtcaca

SEQ ID NO: 180840 - DNA, 15 bp, Homo sapiens
gcctctttgtcacag

SEQ ID NO: 180841 - DNA, 15 bp, Homo sapiens
cctctttgtcacagg

SEQ ID NO: 180842 - DNA, 15 bp, Homo sapiens
ctctttgtcacaggg

SEQ ID NO: 180843 - DNA, 15 bp, Homo sapiens
tctttgtcacaggga

SEQ ID NO: 180844 - DNA, 15 bp, Homo sapiens
ctttgtcacagggaa

SEQ ID NO: 180845 - DNA, 15 bp, Homo sapiens
tttgtcacagggaag

SEQ ID NO: 180846 - DNA, 15 bp, Homo sapiens
ttgtcacagggaaga

SEQ ID NO: 180847 - DNA, 15 bp, Homo sapiens
tgtcacagggaagaa

SEQ ID NO: 180848 - DNA, 15 bp, Homo sapiens
gtcacagggaagaag

SEQ ID NO: 180849 - DNA, 15 bp, Homo sapiens
tcacagggaagaagt

SEQ ID NO: 180850 - DNA, 15 bp, Homo sapiens
cacagggaagaagtg

SEQ ID NO: 180851 - DNA, 15 bp, Homo sapiens
acagggaagaagtgt

SEQ ID NO: 180852 - DNA, 15 bp, Homo sapiens
cagggaagaagtgta

SEQ ID NO: 180853 - DNA, 15 bp, Homo sapiens
agggaagaagtgtag

SEQ ID NO: 180854 - DNA, 15 bp, Homo sapiens
gggaagaagtgtagg

SEQ ID NO: 180855 - DNA, 15 bp, Homo sapiens
ggaagaagtgtagga

SEQ ID NO: 180856 - DNA, 15 bp, Homo sapiens
gaagaagtgtaggag

SEQ ID NO: 180857 - DNA, 15 bp, Homo sapiens
aagaagtgtaggagg

SEQ ID NO: 180858 - DNA, 15 bp, Homo sapiens
agaagtgtaggaggt

SEQ ID NO: 180859 - DNA, 15 bp, Homo sapiens
gaagtgtaggaggtt

SEQ ID NO: 180860 - DNA, 15 bp, Homo sapiens
aagtgtaggaggttg

SEQ ID NO: 180861 - DNA, 15 bp, Homo sapiens
agtgtaggaggttgc

SEQ ID NO: 180862 - DNA, 15 bp, Homo sapiens
gtgtaggaggttgcc

SEQ ID NO: 180863 - DNA, 15 bp, Homo sapiens
tgtaggaggttgcct

SEQ ID NO: 180864 - DNA, 15 bp, Homo sapiens
gtaggaggttgcctt

SEQ ID NO: 180865 - DNA, 15 bp, Homo sapiens
taggaggttgccttg

SEQ ID NO: 180866 - DNA, 15 bp, Homo sapiens
aggaggttgccttgg

SEQ ID NO: 180867 - DNA, 15 bp, Homo sapiens
ggaggttgccttggg

SEQ ID NO: 180868 - DNA, 15 bp, Homo sapiens
gaggttgccttgggc

SEQ ID NO: 180869 - DNA, 15 bp, Homo sapiens
aggttgccttgggcc

SEQ ID NO: 180870 - DNA, 15 bp, Homo sapiens
ggttgccttgggccc

SEQ ID NO: 180871 - DNA, 15 bp, Homo sapiens
gttgccttgggccct

SEQ ID NO: 180872 - DNA, 15 bp, Homo sapiens
ttgccttgggccctg

SEQ ID NO: 180873 - DNA, 15 bp, Homo sapiens
tgccttgggccctgc

SEQ ID NO: 180874 - DNA, 15 bp, Homo sapiens
gccttgggccctgcc

SEQ ID NO: 180875 - DNA, 15 bp, Homo sapiens
ccttgggccctgcct

SEQ ID NO: 180876 - DNA, 15 bp, Homo sapiens
cttgggccctgcctc

SEQ ID NO: 180877 - DNA, 15 bp, Homo sapiens
ttgggccctgcctct

SEQ ID NO: 180878 - DNA, 15 bp, Homo sapiens
tgggccctgcctctc

SEQ ID NO: 180879 - DNA, 15 bp, Homo sapiens
gggccctgcctctct

SEQ ID NO: 180880 - DNA, 15 bp, Homo sapiens
ggccctgcctctctc

SEQ ID NO: 180881 - DNA, 15 bp, Homo sapiens
gccctgcctctctcc

SEQ ID NO: 180882 - DNA, 15 bp, Homo sapiens
ccctgcctctctcct

SEQ ID NO: 180883 - DNA, 15 bp, Homo sapiens
cctgcctctctccta

SEQ ID NO: 180884 - DNA, 15 bp, Homo sapiens
ctgcctctctcctaa

SEQ ID NO: 180885 - DNA, 15 bp, Homo sapiens
tgcctctctcctaac

SEQ ID NO: 180886 - DNA, 15 bp, Homo sapiens
gcctctctcctaacc

SEQ ID NO: 180887 - DNA, 15 bp, Homo sapiens
cctctctcctaacct

SEQ ID NO: 180888 - DNA, 15 bp, Homo sapiens
ctctctcctaacctc

SEQ ID NO: 180889 - DNA, 15 bp, Homo sapiens
tctctcctaacctcc

SEQ ID NO: 180890 - DNA, 15 bp, Homo sapiens
ctctcctaacctcct

SEQ ID NO: 180891 - DNA, 15 bp, Homo sapiens
tctcctaacctcctc

SEQ ID NO: 180892 - DNA, 15 bp, Homo sapiens
ctcctaacctcctct

SEQ ID NO: 180893 - DNA, 15 bp, Homo sapiens
tcctaacctcctctt

SEQ ID NO: 180894 - DNA, 15 bp, Homo sapiens
cctaacctcctcttc

SEQ ID NO: 180895 - DNA, 15 bp, Homo sapiens
ctaacctcctcttcc

SEQ ID NO: 180896 - DNA, 15 bp, Homo sapiens
taacctcctcttccc

SEQ ID NO: 180897 - DNA, 15 bp, Homo sapiens
aacctcctcttcccc

SEQ ID NO: 180898 - DNA, 15 bp, Homo sapiens
acctcctcttcccca

SEQ ID NO: 180899 - DNA, 15 bp, Homo sapiens
cctcctcttccccac

SEQ ID NO: 180900 - DNA, 15 bp, Homo sapiens
ctcctcttccccact

SEQ ID NO: 180901 - DNA, 15 bp, Homo sapiens
tcctcttccccactg

SEQ ID NO: 180902 - DNA, 15 bp, Homo sapiens
cctcttccccactgg

SEQ ID NO: 180903 - DNA, 15 bp, Homo sapiens
ctcttccccactggg

SEQ ID NO: 180904 - DNA, 15 bp, Homo sapiens
tcttccccactgggt

SEQ ID NO: 180905 - DNA, 15 bp, Homo sapiens
cttccccactgggta

SEQ ID NO: 180906 - DNA, 15 bp, Homo sapiens
ttccccactgggtac

SEQ ID NO: 180907 - DNA, 15 bp, Homo sapiens
tccccactgggtacc

SEQ ID NO: 180908 - DNA, 15 bp, Homo sapiens
ccccactgggtaccc

SEQ ID NO: 180909 - DNA, 15 bp, Homo sapiens
cccactgggtaccct

SEQ ID NO: 180910 - DNA, 15 bp, Homo sapiens
ccactgggtaccctc

SEQ ID NO: 180911 - DNA, 15 bp, Homo sapiens
cactgggtaccctca

SEQ ID NO: 180912 - DNA, 15 bp, Homo sapiens
actgggtaccctcag

SEQ ID NO: 180913 - DNA, 15 bp, Homo sapiens
ctgggtaccctcagc

SEQ ID NO: 180914 - DNA, 15 bp, Homo sapiens
tgggtaccctcagcc

SEQ ID NO: 180915 - DNA, 15 bp, Homo sapiens
gggtaccctcagccc

SEQ ID NO: 180916 - DNA, 15 bp, Homo sapiens
ggtaccctcagcccc

SEQ ID NO: 180917 - DNA, 15 bp, Homo sapiens
gtaccctcagcccct

SEQ ID NO: 180918 - DNA, 15 bp, Homo sapiens
taccctcagccccta

SEQ ID NO: 180919 - DNA, 15 bp, Homo sapiens
accctcagcccctat

SEQ ID NO: 180920 - DNA, 15 bp, Homo sapiens
ccctcagcccctata

SEQ ID NO: 180921 - DNA, 15 bp, Homo sapiens
cctcagcccctatat

SEQ ID NO: 180922 - DNA, 15 bp, Homo sapiens
ctcagcccctatatt

SEQ ID NO: 180923 - DNA, 15 bp, Homo sapiens
tcagcccctatattt

SEQ ID NO: 180924 - DNA, 15 bp, Homo sapiens
cagcccctatatttt

SEQ ID NO: 180925 - DNA, 15 bp, Homo sapiens
agcccctatatttta

SEQ ID NO: 180926 - DNA, 15 bp, Homo sapiens
gcccctatattttaa

SEQ ID NO: 180927 - DNA, 15 bp, Homo sapiens
cccctatattttaat

SEQ ID NO: 180928 - DNA, 15 bp, Homo sapiens
ccctatattttaatt

SEQ ID NO: 180929 - DNA, 15 bp, Homo sapiens
cctatattttaattc

SEQ ID NO: 180930 - DNA, 15 bp, Homo sapiens
ctatattttaattct

SEQ ID NO: 180931 - DNA, 15 bp, Homo sapiens
tatattttaattctt

SEQ ID NO: 180932 - DNA, 15 bp, Homo sapiens
atattttaattcttg

SEQ ID NO: 180933 - DNA, 15 bp, Homo sapiens
tattttaattcttga

SEQ ID NO: 180934 - DNA, 15 bp, Homo sapiens
attttaattcttgat

SEQ ID NO: 180935 - DNA, 15 bp, Homo sapiens
ttttaattcttgatc

SEQ ID NO: 180936 - DNA, 15 bp, Homo sapiens
tttaattcttgatca

SEQ ID NO: 180937 - DNA, 15 bp, Homo sapiens
ttaattcttgatcat

SEQ ID NO: 180938 - DNA, 15 bp, Homo sapiens
taattcttgatcatg

SEQ ID NO: 180939 - DNA, 15 bp, Homo sapiens
aattcttgatcatgt

SEQ ID NO: 180940 - DNA, 15 bp, Homo sapiens
attcttgatcatgta

SEQ ID NO: 180941 - DNA, 15 bp, Homo sapiens
ttcttgatcatgtag

SEQ ID NO: 180942 - DNA, 15 bp, Homo sapiens
tcttgatcatgtaga

SEQ ID NO: 180943 - DNA, 15 bp, Homo sapiens
cttgatcatgtagaa

SEQ ID NO: 180944 - DNA, 15 bp, Homo sapiens
ttgatcatgtagaaa

SEQ ID NO: 180945 - DNA, 15 bp, Homo sapiens
tgatcatgtagaaat

SEQ ID NO: 180946 - DNA, 15 bp, Homo sapiens
gatcatgtagaaatt

SEQ ID NO: 180947 - DNA, 15 bp, Homo sapiens
atcatgtagaaattg

SEQ ID NO: 180948 - DNA, 15 bp, Homo sapiens
tcatgtagaaattgt

SEQ ID NO: 180949 - DNA, 15 bp, Homo sapiens
catgtagaaattgtt

SEQ ID NO: 180950 - DNA, 15 bp, Homo sapiens
atgtagaaattgttt

SEQ ID NO: 180951 - DNA, 15 bp, Homo sapiens
tgtagaaattgtttt

SEQ ID NO: 180952 - DNA, 15 bp, Homo sapiens
gtagaaattgttttt

SEQ ID NO: 180953 - DNA, 15 bp, Homo sapiens
tagaaattgtttttg

SEQ ID NO: 180954 - DNA, 15 bp, Homo sapiens
agaaattgtttttgg

SEQ ID NO: 180955 - DNA, 15 bp, Homo sapiens
gaaattgtttttggt

SEQ ID NO: 180956 - DNA, 15 bp, Homo sapiens
aaattgtttttggta

SEQ ID NO: 180957 - DNA, 15 bp, Homo sapiens
aattgtttttggtaa

SEQ ID NO: 180958 - DNA, 15 bp, Homo sapiens
attgtttttggtaaa

SEQ ID NO: 180959 - DNA, 15 bp, Homo sapiens
ttgtttttggtaaat

SEQ ID NO: 180960 - DNA, 15 bp, Homo sapiens
tgtttttggtaaatg

SEQ ID NO: 180961 - DNA, 15 bp, Homo sapiens
gtttttggtaaatgt

SEQ ID NO: 180962 - DNA, 15 bp, Homo sapiens
tttttggtaaatgtt

SEQ ID NO: 180963 - DNA, 15 bp, Homo sapiens
ttttggtaaatgttg

SEQ ID NO: 180964 - DNA, 15 bp, Homo sapiens
tttggtaaatgttga

SEQ ID NO: 180965 - DNA, 15 bp, Homo sapiens
ttggtaaatgttgat

SEQ ID NO: 180966 - DNA, 15 bp, Homo sapiens
tggtaaatgttgata

SEQ ID NO: 180967 - DNA, 15 bp, Homo sapiens
ggtaaatgttgatat

SEQ ID NO: 180968 - DNA, 15 bp, Homo sapiens
gtaaatgttgatatt

SEQ ID NO: 180969 - DNA, 15 bp, Homo sapiens
taaatgttgatatta

SEQ ID NO: 180970 - DNA, 15 bp, Homo sapiens
aaatgttgatattat

SEQ ID NO: 180971 - DNA, 15 bp, Homo sapiens
aatgttgatattatt

SEQ ID NO: 180972 - DNA, 15 bp, Homo sapiens
atgttgatattattg

SEQ ID NO: 180973 - DNA, 15 bp, Homo sapiens
tgttgatattattgt

SEQ ID NO: 180974 - DNA, 15 bp, Homo sapiens
gttgatattattgtt

SEQ ID NO: 180975 - DNA, 15 bp, Homo sapiens
ttgatattattgtta

SEQ ID NO: 180976 - DNA, 15 bp, Homo sapiens
tgatattattgttat

SEQ ID NO: 180977 - DNA, 15 bp, Homo sapiens
gatattattgttatt

SEQ ID NO: 180978 - DNA, 15 bp, Homo sapiens
atattattgttatta

SEQ ID NO: 180979 - DNA, 15 bp, Homo sapiens
tattattgttattat

SEQ ID NO: 180980 - DNA, 15 bp, Homo sapiens
attattgttattatc

SEQ ID NO: 180981 - DNA, 15 bp, Homo sapiens
ttattgttattatca

SEQ ID NO: 180982 - DNA, 15 bp, Homo sapiens
tattgttattatcat

SEQ ID NO: 180983 - DNA, 15 bp, Homo sapiens
attgttattatcatt

SEQ ID NO: 180984 - DNA, 15 bp, Homo sapiens
ttgttattatcatta

SEQ ID NO: 180985 - DNA, 15 bp, Homo sapiens
tgttattatcattat

SEQ ID NO: 180986 - DNA, 15 bp, Homo sapiens
gttattatcattatt

SEQ ID NO: 180987 - DNA, 15 bp, Homo sapiens
ttattatcattatta

SEQ ID NO: 180988 - DNA, 15 bp, Homo sapiens
tattatcattattaa

SEQ ID NO: 180989 - DNA, 15 bp, Homo sapiens
attatcattattaat

SEQ ID NO: 180990 - DNA, 15 bp, Homo sapiens
ttatcattattaata

SEQ ID NO: 180991 - DNA, 15 bp, Homo sapiens
tatcattattaataa

SEQ ID NO: 180992 - DNA, 15 bp, Homo sapiens
atcattattaataaa

SEQ ID NO: 180993 - DNA, 15 bp, Homo sapiens
tcattattaataaat

SEQ ID NO: 180994 - DNA, 15 bp, Homo sapiens
cattattaataaata

SEQ ID NO: 180995 - DNA, 15 bp, Homo sapiens
attattaataaataa

SEQ ID NO: 180996 - DNA, 15 bp, Homo sapiens
ttattaataaataaa

SEQ ID NO: 180997 - DNA, 15 bp, Homo sapiens
tattaataaataaag

SEQ ID NO: 180998 - DNA, 15 bp, Homo sapiens
attaataaataaaga

SEQ ID NO: 180999 - DNA, 15 bp, Homo sapiens
ttaataaataaagag

SEQ ID NO: 181000 - DNA, 15 bp, Homo sapiens
taataaataaagaga

SEQ ID NO: 181001 - DNA, 15 bp, Homo sapiens
aataaataaagagaa

SEQ ID NO: 181002 - DNA, 15 bp, Homo sapiens
ataaataaagagaaa

SEQ ID NO: 181003 - DNA, 15 bp, Homo sapiens
taaataaagagaaaa

SEQ ID NO: 181004 - DNA, 15 bp, Homo sapiens
aaataaagagaaaag

SEQ ID NO: 181005 - DNA, 15 bp, Homo sapiens
aataaagagaaaagg

SEQ ID NO: 181006 - DNA, 15 bp, Homo sapiens
ataaagagaaaagga

SEQ ID NO: 181007 - DNA, 15 bp, Homo sapiens
taaagagaaaaggaa

SEQ ID NO: 181008 - DNA, 15 bp, Homo sapiens
aaagagaaaaggaat

SEQ ID NO: 181009 - DNA, 15 bp, Homo sapiens
aagagaaaaggaatt

SEQ ID NO: 181010 - DNA, 15 bp, Homo sapiens
agagaaaaggaattt

SEQ ID NO: 181011 - DNA, 15 bp, Homo sapiens
gagaaaaggaatttt

SEQ ID NO: 181012 - DNA, 15 bp, Homo sapiens
agaaaaggaattttt

SEQ ID NO: 181013 - DNA, 15 bp, Homo sapiens
gaaaaggaatttttg

SEQ ID NO: 181014 - DNA, 15 bp, Homo sapiens
aaaaggaatttttgt

SEQ ID NO: 181015 - DNA, 15 bp, Homo sapiens
aaaggaatttttgtt

SEQ ID NO: 181016 - DNA, 15 bp, Homo sapiens
aaggaatttttgttt

SEQ ID NO: 181017 - DNA, 15 bp, Homo sapiens
aggaatttttgttta

SEQ ID NO: 181018 - DNA, 15 bp, Homo sapiens
ggaatttttgtttaa

SEQ ID NO: 181019 - DNA, 15 bp, Homo sapiens
gaatttttgtttaaa

SEQ ID NO: 181020 - DNA, 15 bp, Homo sapiens
aatttttgtttaaat

SEQ ID NO: 181021 - DNA, 15 bp, Homo sapiens
atttttgtttaaatg

SEQ ID NO: 181022 - DNA, 15 bp, Homo sapiens
tttttgtttaaatga

SEQ ID NO: 181023 - DNA, 15 bp, Homo sapiens
ttttgtttaaatgag

SEQ ID NO: 181024 - DNA, 15 bp, Homo sapiens
tttgtttaaatgaga

SEQ ID NO: 181025 - DNA, 15 bp, Homo sapiens
ttgtttaaatgagaa

SEQ ID NO: 181026 - DNA, 15 bp, Homo sapiens
tgtttaaatgagaaa

SEQ ID NO: 181027 - DNA, 15 bp, Homo sapiens
gtttaaatgagaaat

SEQ ID NO: 181028 - DNA, 15 bp, Homo sapiens
tttaaatgagaaatg

SEQ ID NO: 181029 - DNA, 15 bp, Homo sapiens
ttaaatgagaaatgt

SEQ ID NO: 181030 - DNA, 15 bp, Homo sapiens
taaatgagaaatgtt

SEQ ID NO: 181031 - DNA, 15 bp, Homo sapiens
aaatgagaaatgttt

SEQ ID NO: 181032 - DNA, 15 bp, Homo sapiens
aatgagaaatgttta

SEQ ID NO: 181033 - DNA, 15 bp, Homo sapiens
atgagaaatgtttaa

SEQ ID NO: 181034 - DNA, 15 bp, Homo sapiens
tgagaaatgtttaac

SEQ ID NO: 181035 - DNA, 15 bp, Homo sapiens
gagaaatgtttaacc

SEQ ID NO: 181036 - DNA, 15 bp, Homo sapiens
agaaatgtttaacca

SEQ ID NO: 181037 - DNA, 15 bp, Homo sapiens
gaaatgtttaaccag

SEQ ID NO: 181038 - DNA, 15 bp, Homo sapiens
aaatgtttaaccaga

SEQ ID NO: 181039 - DNA, 15 bp, Homo sapiens
aatgtttaaccagat

SEQ ID NO: 181040 - DNA, 15 bp, Homo sapiens
atgtttaaccagatt

SEQ ID NO: 181041 - DNA, 15 bp, Homo sapiens
tgtttaaccagattc

SEQ ID NO: 181042 - DNA, 15 bp, Homo sapiens
gtttaaccagattct

SEQ ID NO: 181043 - DNA, 15 bp, Homo sapiens
tttaaccagattctg

SEQ ID NO: 181044 - DNA, 15 bp, Homo sapiens
ttaaccagattctgt

SEQ ID NO: 181045 - DNA, 15 bp, Homo sapiens
taaccagattctgtt

SEQ ID NO: 181046 - DNA, 15 bp, Homo sapiens
aaccagattctgttc

SEQ ID NO: 181047 - DNA, 15 bp, Homo sapiens
accagattctgttct

SEQ ID NO: 181048 - DNA, 15 bp, Homo sapiens
ccagattctgttcta

SEQ ID NO: 181049 - DNA, 15 bp, Homo sapiens
cagattctgttctat

SEQ ID NO: 181050 - DNA, 15 bp, Homo sapiens
agattctgttctatt

SEQ ID NO: 181051 - DNA, 15 bp, Homo sapiens
gattctgttctattt

SEQ ID NO: 181052 - DNA, 15 bp, Homo sapiens
attctgttctatttg

SEQ ID NO: 181053 - DNA, 15 bp, Homo sapiens
ttctgttctatttga

SEQ ID NO: 181054 - DNA, 15 bp, Homo sapiens
tctgttctatttgaa

SEQ ID NO: 181055 - DNA, 15 bp, Homo sapiens
ctgttctatttgaat

SEQ ID NO: 181056 - DNA, 15 bp, Homo sapiens
tgttctatttgaatt

SEQ ID NO: 181057 - DNA, 15 bp, Homo sapiens
gttctatttgaattg

SEQ ID NO: 181058 - DNA, 15 bp, Homo sapiens
ttctatttgaattgt

SEQ ID NO: 181059 - DNA, 15 bp, Homo sapiens
tctatttgaattgtg

SEQ ID NO: 181060 - DNA, 15 bp, Homo sapiens
ctatttgaattgtga

SEQ ID NO: 181061 - DNA, 15 bp, Homo sapiens
tatttgaattgtgac

SEQ ID NO: 181062 - DNA, 15 bp, Homo sapiens
atttgaattgtgact

SEQ ID NO: 181063 - DNA, 15 bp, Homo sapiens
tttgaattgtgactt

SEQ ID NO: 181064 - DNA, 15 bp, Homo sapiens
ttgaattgtgacttg

SEQ ID NO: 181065 - DNA, 15 bp, Homo sapiens
tgaattgtgacttgc

SEQ ID NO: 181066 - DNA, 15 bp, Homo sapiens
gaattgtgacttgca

SEQ ID NO: 181067 - DNA, 15 bp, Homo sapiens
aattgtgacttgcac

SEQ ID NO: 181068 - DNA, 15 bp, Homo sapiens
attgtgacttgcacc

SEQ ID NO: 181069 - DNA, 15 bp, Homo sapiens
ttgtgacttgcacct

SEQ ID NO: 181070 - DNA, 15 bp, Homo sapiens
tgtgacttgcacctt

SEQ ID NO: 181071 - DNA, 15 bp, Homo sapiens
gtgacttgcaccttt

SEQ ID NO: 181072 - DNA, 15 bp, Homo sapiens
tgacttgcacctttt

SEQ ID NO: 181073 - DNA, 15 bp, Homo sapiens
gacttgcaccttttg

SEQ ID NO: 181074 - DNA, 15 bp, Homo sapiens
acttgcaccttttgt

SEQ ID NO: 181075 - DNA, 15 bp, Homo sapiens
cttgcaccttttgtt

SEQ ID NO: 181076 - DNA, 15 bp, Homo sapiens
ttgcaccttttgttc

SEQ ID NO: 181077 - DNA, 15 bp, Homo sapiens
tgcaccttttgttca

SEQ ID NO: 181078 - DNA, 15 bp, Homo sapiens
gcaccttttgttcaa

SEQ ID NO: 181079 - DNA, 15 bp, Homo sapiens
caccttttgttcaaa

SEQ ID NO: 181080 - DNA, 15 bp, Homo sapiens
accttttgttcaaag

SEQ ID NO: 181081 - DNA, 15 bp, Homo sapiens
ccttttgttcaaagt

SEQ ID NO: 181082 - DNA, 15 bp, Homo sapiens
cttttgttcaaagta

SEQ ID NO: 181083 - DNA, 15 bp, Homo sapiens
ttttgttcaaagtat

SEQ ID NO: 181084 - DNA, 15 bp, Homo sapiens
tttgttcaaagtatt

SEQ ID NO: 181085 - DNA, 15 bp, Homo sapiens
ttgttcaaagtattt

SEQ ID NO: 181086 - DNA, 15 bp, Homo sapiens
tgttcaaagtatttc

SEQ ID NO: 181087 - DNA, 15 bp, Homo sapiens
gttcaaagtatttcc

SEQ ID NO: 181088 - DNA, 15 bp, Homo sapiens
ttcaaagtatttcct

SEQ ID NO: 181089 - DNA, 15 bp, Homo sapiens
tcaaagtatttcctt

SEQ ID NO: 181090 - DNA, 15 bp, Homo sapiens
caaagtatttccttt

SEQ ID NO: 181091 - DNA, 15 bp, Homo sapiens
aaagtatttccttta

SEQ ID NO: 181092 - DNA, 15 bp, Homo sapiens
aagtatttcctttag

SEQ ID NO: 181093 - DNA, 15 bp, Homo sapiens
agtatttcctttagg

SEQ ID NO: 181094 - DNA, 15 bp, Homo sapiens
gtatttcctttaggc

SEQ ID NO: 181095 - DNA, 15 bp, Homo sapiens
tatttcctttaggca

SEQ ID NO: 181096 - DNA, 15 bp, Homo sapiens
atttcctttaggcat

SEQ ID NO: 181097 - DNA, 15 bp, Homo sapiens
tttcctttaggcatt

SEQ ID NO: 181098 - DNA, 15 bp, Homo sapiens
ttcctttaggcattg

SEQ ID NO: 181099 - DNA, 15 bp, Homo sapiens
tcctttaggcattgt

SEQ ID NO: 181100 - DNA, 15 bp, Homo sapiens
cctttaggcattgta

SEQ ID NO: 181101 - DNA, 15 bp, Homo sapiens
ctttaggcattgtaa

SEQ ID NO: 181102 - DNA, 15 bp, Homo sapiens
tttaggcattgtaat

SEQ ID NO: 181103 - DNA, 15 bp, Homo sapiens
ttaggcattgtaatt

SEQ ID NO: 181104 - DNA, 15 bp, Homo sapiens
taggcattgtaattg

SEQ ID NO: 181105 - DNA, 15 bp, Homo sapiens
aggcattgtaattgt

SEQ ID NO: 181106 - DNA, 15 bp, Homo sapiens
ggcattgtaattgtg

SEQ ID NO: 181107 - DNA, 15 bp, Homo sapiens
gcattgtaattgtga

SEQ ID NO: 181108 - DNA, 15 bp, Homo sapiens
cattgtaattgtgaa

SEQ ID NO: 181109 - DNA, 15 bp, Homo sapiens
attgtaattgtgaac

SEQ ID NO: 181110 - DNA, 15 bp, Homo sapiens
ttgtaattgtgaaca

SEQ ID NO: 181111 - DNA, 15 bp, Homo sapiens
tgtaattgtgaacag

SEQ ID NO: 181112 - DNA, 15 bp, Homo sapiens
gtaattgtgaacagc

SEQ ID NO: 181113 - DNA, 15 bp, Homo sapiens
taattgtgaacagct

SEQ ID NO: 181114 - DNA, 15 bp, Homo sapiens
aattgtgaacagctc

SEQ ID NO: 181115 - DNA, 15 bp, Homo sapiens
attgtgaacagctct

SEQ ID NO: 181116 - DNA, 15 bp, Homo sapiens
ttgtgaacagctctt

SEQ ID NO: 181117 - DNA, 15 bp, Homo sapiens
tgtgaacagctctta

SEQ ID NO: 181118 - DNA, 15 bp, Homo sapiens
gtgaacagctcttac

SEQ ID NO: 181119 - DNA, 15 bp, Homo sapiens
tgaacagctcttact

SEQ ID NO: 181120 - DNA, 15 bp, Homo sapiens
gaacagctcttactt

SEQ ID NO: 181121 - DNA, 15 bp, Homo sapiens
aacagctcttacttg

SEQ ID NO: 181122 - DNA, 15 bp, Homo sapiens
acagctcttacttgt

SEQ ID NO: 181123 - DNA, 15 bp, Homo sapiens
cagctcttacttgtg

SEQ ID NO: 181124 - DNA, 15 bp, Homo sapiens
agctcttacttgtgc

SEQ ID NO: 181125 - DNA, 15 bp, Homo sapiens
gctcttacttgtgcc

SEQ ID NO: 181126 - DNA, 15 bp, Homo sapiens
ctcttacttgtgcca

SEQ ID NO: 181127 - DNA, 15 bp, Homo sapiens
tcttacttgtgccag

SEQ ID NO: 181128 - DNA, 15 bp, Homo sapiens
cttacttgtgccagt

SEQ ID NO: 181129 - DNA, 15 bp, Homo sapiens
ttacttgtgccagtg

SEQ ID NO: 181130 - DNA, 15 bp, Homo sapiens
tacttgtgccagtga

SEQ ID NO: 181131 - DNA, 15 bp, Homo sapiens
acttgtgccagtgac

SEQ ID NO: 181132 - DNA, 15 bp, Homo sapiens
cttgtgccagtgaca

SEQ ID NO: 181133 - DNA, 15 bp, Homo sapiens
ttgtgccagtgacag

SEQ ID NO: 181134 - DNA, 15 bp, Homo sapiens
tgtgccagtgacaga

SEQ ID NO: 181135 - DNA, 15 bp, Homo sapiens
gtgccagtgacagat

SEQ ID NO: 181136 - DNA, 15 bp, Homo sapiens
tgccagtgacagatg

SEQ ID NO: 181137 - DNA, 15 bp, Homo sapiens
gccagtgacagatgc

SEQ ID NO: 181138 - DNA, 15 bp, Homo sapiens
ccagtgacagatgca

SEQ ID NO: 181139 - DNA, 15 bp, Homo sapiens
cagtgacagatgcag

SEQ ID NO: 181140 - DNA, 15 bp, Homo sapiens
agtgacagatgcagt

SEQ ID NO: 181141 - DNA, 15 bp, Homo sapiens
gtgacagatgcagtg

SEQ ID NO: 181142 - DNA, 15 bp, Homo sapiens
tgacagatgcagtgg

SEQ ID NO: 181143 - DNA, 15 bp, Homo sapiens
gacagatgcagtggt

SEQ ID NO: 181144 - DNA, 15 bp, Homo sapiens
acagatgcagtggtc

SEQ ID NO: 181145 - DNA, 15 bp, Homo sapiens
cagatgcagtggtct

SEQ ID NO: 181146 - DNA, 15 bp, Homo sapiens
agatgcagtggtctc

SEQ ID NO: 181147 - DNA, 15 bp, Homo sapiens
gatgcagtggtctcc

SEQ ID NO: 181148 - DNA, 15 bp, Homo sapiens
atgcagtggtctcct

SEQ ID NO: 181149 - DNA, 15 bp, Homo sapiens
tgcagtggtctcctt

SEQ ID NO: 181150 - DNA, 15 bp, Homo sapiens
gcagtggtctccttt

SEQ ID NO: 181151 - DNA, 15 bp, Homo sapiens
cagtggtctcctttc

SEQ ID NO: 181152 - DNA, 15 bp, Homo sapiens
agtggtctcctttcc

SEQ ID NO: 181153 - DNA, 15 bp, Homo sapiens
gtggtctcctttccc

SEQ ID NO: 181154 - DNA, 15 bp, Homo sapiens
tggtctcctttcccc

SEQ ID NO: 181155 - DNA, 15 bp, Homo sapiens
ggtctcctttcccca

SEQ ID NO: 181156 - DNA, 15 bp, Homo sapiens
gtctcctttccccag

SEQ ID NO: 181157 - DNA, 15 bp, Homo sapiens
tctcctttccccagt

SEQ ID NO: 181158 - DNA, 15 bp, Homo sapiens
ctcctttccccagtt

SEQ ID NO: 181159 - DNA, 15 bp, Homo sapiens
tcctttccccagttg

SEQ ID NO: 181160 - DNA, 15 bp, Homo sapiens
cctttccccagttga

SEQ ID NO: 181161 - DNA, 15 bp, Homo sapiens
ctttccccagttgaa

SEQ ID NO: 181162 - DNA, 15 bp, Homo sapiens
tttccccagttgaag

SEQ ID NO: 181163 - DNA, 15 bp, Homo sapiens
ttccccagttgaagc

SEQ ID NO: 181164 - DNA, 15 bp, Homo sapiens
tccccagttgaagca

SEQ ID NO: 181165 - DNA, 15 bp, Homo sapiens
ccccagttgaagcag

SEQ ID NO: 181166 - DNA, 15 bp, Homo sapiens
cccagttgaagcagt

SEQ ID NO: 181167 - DNA, 15 bp, Homo sapiens
ccagttgaagcagtg

SEQ ID NO: 181168 - DNA, 15 bp, Homo sapiens
cagttgaagcagtgc

SEQ ID NO: 181169 - DNA, 15 bp, Homo sapiens
agttgaagcagtgca

SEQ ID NO: 181170 - DNA, 15 bp, Homo sapiens
gttgaagcagtgcat

SEQ ID NO: 181171 - DNA, 15 bp, Homo sapiens
ttgaagcagtgcata

SEQ ID NO: 181172 - DNA, 15 bp, Homo sapiens
tgaagcagtgcatac

SEQ ID NO: 181173 - DNA, 15 bp, Homo sapiens
gaagcagtgcatacg

SEQ ID NO: 181174 - DNA, 15 bp, Homo sapiens
aagcagtgcatacgc

SEQ ID NO: 181175 - DNA, 15 bp, Homo sapiens
agcagtgcatacgca

SEQ ID NO: 181176 - DNA, 15 bp, Homo sapiens
gcagtgcatacgcag

SEQ ID NO: 181177 - DNA, 15 bp, Homo sapiens
cagtgcatacgcagt

SEQ ID NO: 181178 - DNA, 15 bp, Homo sapiens
agtgcatacgcagta

SEQ ID NO: 181179 - DNA, 15 bp, Homo sapiens
gtgcatacgcagtag

SEQ ID NO: 181180 - DNA, 15 bp, Homo sapiens
tgcatacgcagtagc

SEQ ID NO: 181181 - DNA, 15 bp, Homo sapiens
gcatacgcagtagct

SEQ ID NO: 181182 - DNA, 15 bp, Homo sapiens
catacgcagtagcta

SEQ ID NO: 181183 - DNA, 15 bp, Homo sapiens
atacgcagtagctat

SEQ ID NO: 181184 - DNA, 15 bp, Homo sapiens
tacgcagtagctatt

SEQ ID NO: 181185 - DNA, 15 bp, Homo sapiens
acgcagtagctatta

SEQ ID NO: 181186 - DNA, 15 bp, Homo sapiens
cgcagtagctattat

SEQ ID NO: 181187 - DNA, 15 bp, Homo sapiens
gcagtagctattatt

SEQ ID NO: 181188 - DNA, 15 bp, Homo sapiens
cagtagctattattt

SEQ ID NO: 181189 - DNA, 15 bp, Homo sapiens
agtagctattatttg

SEQ ID NO: 181190 - DNA, 15 bp, Homo sapiens
gtagctattatttgt

SEQ ID NO: 181191 - DNA, 15 bp, Homo sapiens
tagctattatttgtg

SEQ ID NO: 181192 - DNA, 15 bp, Homo sapiens
agctattatttgtgt

SEQ ID NO: 181193 - DNA, 15 bp, Homo sapiens
gctattatttgtgtt

SEQ ID NO: 181194 - DNA, 15 bp, Homo sapiens
ctattatttgtgtta

SEQ ID NO: 181195 - DNA, 15 bp, Homo sapiens
tattatttgtgttat

SEQ ID NO: 181196 - DNA, 15 bp, Homo sapiens
attatttgtgttatc

SEQ ID NO: 181197 - DNA, 15 bp, Homo sapiens
ttatttgtgttatct

SEQ ID NO: 181198 - DNA, 15 bp, Homo sapiens
tatttgtgttatctt

SEQ ID NO: 181199 - DNA, 15 bp, Homo sapiens
atttgtgttatcttt

SEQ ID NO: 181200 - DNA, 15 bp, Homo sapiens
tttgtgttatcttta

SEQ ID NO: 181201 - DNA, 15 bp, Homo sapiens
ttgtgttatctttat

SEQ ID NO: 181202 - DNA, 15 bp, Homo sapiens
tgtgttatctttatt

SEQ ID NO: 181203 - DNA, 15 bp, Homo sapiens
gtgttatctttattt

SEQ ID NO: 181204 - DNA, 15 bp, Homo sapiens
tgttatctttatttc

SEQ ID NO: 181205 - DNA, 15 bp, Homo sapiens
gttatctttatttct

SEQ ID NO: 181206 - DNA, 15 bp, Homo sapiens
ttatctttatttctc

SEQ ID NO: 181207 - DNA, 15 bp, Homo sapiens
tatctttatttctct

SEQ ID NO: 181208 - DNA, 15 bp, Homo sapiens
atctttatttctctt

SEQ ID NO: 181209 - DNA, 15 bp, Homo sapiens
tctttatttctcttc

SEQ ID NO: 181210 - DNA, 15 bp, Homo sapiens
ctttatttctcttca

SEQ ID NO: 181211 - DNA, 15 bp, Homo sapiens
tttatttctcttcat

SEQ ID NO: 181212 - DNA, 15 bp, Homo sapiens
ttatttctcttcatt

SEQ ID NO: 181213 - DNA, 15 bp, Homo sapiens
tatttctcttcattg

SEQ ID NO: 181214 - DNA, 15 bp, Homo sapiens
atttctcttcattgt

SEQ ID NO: 181215 - DNA, 15 bp, Homo sapiens
tttctcttcattgtt

SEQ ID NO: 181216 - DNA, 15 bp, Homo sapiens
ttctcttcattgtta

SEQ ID NO: 181217 - DNA, 15 bp, Homo sapiens
tctcttcattgttag

SEQ ID NO: 181218 - DNA, 15 bp, Homo sapiens
ctcttcattgttaga

SEQ ID NO: 181219 - DNA, 15 bp, Homo sapiens
tcttcattgttagaa

SEQ ID NO: 181220 - DNA, 15 bp, Homo sapiens
cttcattgttagaaa

SEQ ID NO: 181221 - DNA, 15 bp, Homo sapiens
ttcattgttagaaac

SEQ ID NO: 181222 - DNA, 15 bp, Homo sapiens
tcattgttagaaacc

SEQ ID NO: 181223 - DNA, 15 bp, Homo sapiens
cattgttagaaacca

SEQ ID NO: 181224 - DNA, 15 bp, Homo sapiens
attgttagaaaccaa

SEQ ID NO: 181225 - DNA, 15 bp, Homo sapiens
ttgttagaaaccaaa

SEQ ID NO: 181226 - DNA, 15 bp, Homo sapiens
tgttagaaaccaaag

SEQ ID NO: 181227 - DNA, 15 bp, Homo sapiens
gttagaaaccaaagt

SEQ ID NO: 181228 - DNA, 15 bp, Homo sapiens
ttagaaaccaaagtc

SEQ ID NO: 181229 - DNA, 15 bp, Homo sapiens
tagaaaccaaagtct

SEQ ID NO: 181230 - DNA, 15 bp, Homo sapiens
agaaaccaaagtctt

SEQ ID NO: 181231 - DNA, 15 bp, Homo sapiens
gaaaccaaagtcttc

SEQ ID NO: 181232 - DNA, 15 bp, Homo sapiens
aaaccaaagtcttct

SEQ ID NO: 181233 - DNA, 15 bp, Homo sapiens
aaccaaagtcttctc

SEQ ID NO: 181234 - DNA, 15 bp, Homo sapiens
accaaagtcttctct

SEQ ID NO: 181235 - DNA, 15 bp, Homo sapiens
ccaaagtcttctctg

SEQ ID NO: 181236 - DNA, 15 bp, Homo sapiens
caaagtcttctctgc

SEQ ID NO: 181237 - DNA, 15 bp, Homo sapiens
aaagtcttctctgct

SEQ ID NO: 181238 - DNA, 15 bp, Homo sapiens
aagtcttctctgctg

SEQ ID NO: 181239 - DNA, 15 bp, Homo sapiens
agtcttctctgctgg

SEQ ID NO: 181240 - DNA, 15 bp, Homo sapiens
gtcttctctgctggc

SEQ ID NO: 181241 - DNA, 15 bp, Homo sapiens
tcttctctgctggct

SEQ ID NO: 181242 - DNA, 15 bp, Homo sapiens
cttctctgctggctg

SEQ ID NO: 181243 - DNA, 15 bp, Homo sapiens
ttctctgctggctgg

SEQ ID NO: 181244 - DNA, 15 bp, Homo sapiens
tctctgctggctggg

SEQ ID NO: 181245 - DNA, 15 bp, Homo sapiens
ctctgctggctgggg

SEQ ID NO: 181246 - DNA, 15 bp, Homo sapiens
tctgctggctggggc

SEQ ID NO: 181247 - DNA, 15 bp, Homo sapiens
ctgctggctggggct

SEQ ID NO: 181248 - DNA, 15 bp, Homo sapiens
tgctggctggggctg

SEQ ID NO: 181249 - DNA, 15 bp, Homo sapiens
gctggctggggctga

SEQ ID NO: 181250 - DNA, 15 bp, Homo sapiens
ctggctggggctgag

SEQ ID NO: 181251 - DNA, 15 bp, Homo sapiens
tggctggggctgaga

SEQ ID NO: 181252 - DNA, 15 bp, Homo sapiens
ggctggggctgagag

SEQ ID NO: 181253 - DNA, 15 bp, Homo sapiens
gctggggctgagaga

SEQ ID NO: 181254 - DNA, 15 bp, Homo sapiens
ctggggctgagagag

SEQ ID NO: 181255 - DNA, 15 bp, Homo sapiens
tggggctgagagagg

SEQ ID NO: 181256 - DNA, 15 bp, Homo sapiens
ggggctgagagaggg

SEQ ID NO: 181257 - DNA, 15 bp, Homo sapiens
gggctgagagagggt

SEQ ID NO: 181258 - DNA, 15 bp, Homo sapiens
ggctgagagagggtc

SEQ ID NO: 181259 - DNA, 15 bp, Homo sapiens
gctgagagagggtct

SEQ ID NO: 181260 - DNA, 15 bp, Homo sapiens
ctgagagagggtctg

SEQ ID NO: 181261 - DNA, 15 bp, Homo sapiens
tgagagagggtctgg

SEQ ID NO: 181262 - DNA, 15 bp, Homo sapiens
gagagagggtctggg

SEQ ID NO: 181263 - DNA, 15 bp, Homo sapiens
agagagggtctgggt

SEQ ID NO: 181264 - DNA, 15 bp, Homo sapiens
gagagggtctgggtt

SEQ ID NO: 181265 - DNA, 15 bp, Homo sapiens
agagggtctgggtta

SEQ ID NO: 181266 - DNA, 15 bp, Homo sapiens
gagggtctgggttat

SEQ ID NO: 181267 - DNA, 15 bp, Homo sapiens
agggtctgggttatc

SEQ ID NO: 181268 - DNA, 15 bp, Homo sapiens
gggtctgggttatct

SEQ ID NO: 181269 - DNA, 15 bp, Homo sapiens
ggtctgggttatctc

SEQ ID NO: 181270 - DNA, 15 bp, Homo sapiens
gtctgggttatctcc

SEQ ID NO: 181271 - DNA, 15 bp, Homo sapiens
tctgggttatctcct

SEQ ID NO: 181272 - DNA, 15 bp, Homo sapiens
ctgggttatctcctt

SEQ ID NO: 181273 - DNA, 15 bp, Homo sapiens
tgggttatctccttc

SEQ ID NO: 181274 - DNA, 15 bp, Homo sapiens
gggttatctccttct

SEQ ID NO: 181275 - DNA, 15 bp, Homo sapiens
ggttatctccttctg

SEQ ID NO: 181276 - DNA, 15 bp, Homo sapiens
gttatctccttctga

SEQ ID NO: 181277 - DNA, 15 bp, Homo sapiens
ttatctccttctgat

SEQ ID NO: 181278 - DNA, 15 bp, Homo sapiens
tatctccttctgatc

SEQ ID NO: 181279 - DNA, 15 bp, Homo sapiens
atctccttctgatct

SEQ ID NO: 181280 - DNA, 15 bp, Homo sapiens
tctccttctgatctt

SEQ ID NO: 181281 - DNA, 15 bp, Homo sapiens
ctccttctgatcttc

SEQ ID NO: 181282 - DNA, 15 bp, Homo sapiens
tccttctgatcttca

SEQ ID NO: 181283 - DNA, 15 bp, Homo sapiens
ccttctgatcttcaa

SEQ ID NO: 181284 - DNA, 15 bp, Homo sapiens
cttctgatcttcaaa

SEQ ID NO: 181285 - DNA, 15 bp, Homo sapiens
ttctgatcttcaaaa

SEQ ID NO: 181286 - DNA, 15 bp, Homo sapiens
tctgatcttcaaaac

SEQ ID NO: 181287 - DNA, 15 bp, Homo sapiens
ctgatcttcaaaaca

SEQ ID NO: 181288 - DNA, 15 bp, Homo sapiens
tgatcttcaaaacaa

SEQ ID NO: 181289 - DNA, 15 bp, Homo sapiens
gatcttcaaaacaag

SEQ ID NO: 181290 - DNA, 15 bp, Homo sapiens
atcttcaaaacaaga

SEQ ID NO: 181291 - DNA, 15 bp, Homo sapiens
tcttcaaaacaagag

SEQ ID NO: 181292 - DNA, 15 bp, Homo sapiens
cttcaaaacaagaga

SEQ ID NO: 181293 - DNA, 15 bp, Homo sapiens
ttcaaaacaagagag

SEQ ID NO: 181294 - DNA, 15 bp, Homo sapiens
tcaaaacaagagaga

SEQ ID NO: 181295 - DNA, 15 bp, Homo sapiens
caaaacaagagagag

SEQ ID NO: 181296 - DNA, 15 bp, Homo sapiens
aaaacaagagagaga

SEQ ID NO: 181297 - DNA, 15 bp, Homo sapiens
aaacaagagagagac

SEQ ID NO: 181298 - DNA, 15 bp, Homo sapiens
aacaagagagagacc

SEQ ID NO: 181299 - DNA, 15 bp, Homo sapiens
acaagagagagacct

SEQ ID NO: 181300 - DNA, 15 bp, Homo sapiens
caagagagagacctt

SEQ ID NO: 181301 - DNA, 15 bp, Homo sapiens
aagagagagaccttg

SEQ ID NO: 181302 - DNA, 15 bp, Homo sapiens
agagagagaccttga

SEQ ID NO: 181303 - DNA, 15 bp, Homo sapiens
gagagagaccttgaa

SEQ ID NO: 181304 - DNA, 15 bp, Homo sapiens
agagagaccttgaat

SEQ ID NO: 181305 - DNA, 15 bp, Homo sapiens
gagagaccttgaata

SEQ ID NO: 181306 - DNA, 15 bp, Homo sapiens
agagaccttgaatac

SEQ ID NO: 181307 - DNA, 15 bp, Homo sapiens
gagaccttgaataca

SEQ ID NO: 181308 - DNA, 15 bp, Homo sapiens
agaccttgaatacac

SEQ ID NO: 181309 - DNA, 15 bp, Homo sapiens
gaccttgaatacact

SEQ ID NO: 181310 - DNA, 15 bp, Homo sapiens
accttgaatacactg

SEQ ID NO: 181311 - DNA, 15 bp, Homo sapiens
ccttgaatacactga

SEQ ID NO: 181312 - DNA, 15 bp, Homo sapiens
cttgaatacactgac

SEQ ID NO: 181313 - DNA, 15 bp, Homo sapiens
ttgaatacactgact

SEQ ID NO: 181314 - DNA, 15 bp, Homo sapiens
tgaatacactgactc

SEQ ID NO: 181315 - DNA, 15 bp, Homo sapiens
gaatacactgactct

SEQ ID NO: 181316 - DNA, 15 bp, Homo sapiens
aatacactgactctt

SEQ ID NO: 181317 - DNA, 15 bp, Homo sapiens
atacactgactcttc

SEQ ID NO: 181318 - DNA, 15 bp, Homo sapiens
tacactgactcttcc

SEQ ID NO: 181319 - DNA, 15 bp, Homo sapiens
acactgactcttcca

SEQ ID NO: 181320 - DNA, 15 bp, Homo sapiens
cactgactcttccac

SEQ ID NO: 181321 - DNA, 15 bp, Homo sapiens
actgactcttccacc

SEQ ID NO: 181322 - DNA, 15 bp, Homo sapiens
ctgactcttccaccc

SEQ ID NO: 181323 - DNA, 15 bp, Homo sapiens
tgactcttccaccct

SEQ ID NO: 181324 - DNA, 15 bp, Homo sapiens
gactcttccaccctt

SEQ ID NO: 181325 - DNA, 15 bp, Homo sapiens
actcttccacccttt

SEQ ID NO: 181326 - DNA, 15 bp, Homo sapiens
ctcttccaccctttt

SEQ ID NO: 181327 - DNA, 15 bp, Homo sapiens
tcttccacccttttt

SEQ ID NO: 181328 - DNA, 15 bp, Homo sapiens
cttccaccctttttt

SEQ ID NO: 181329 - DNA, 15 bp, Homo sapiens
ttccacccttttttt

SEQ ID NO: 181330 - DNA, 15 bp, Homo sapiens
tccaccctttttttt

SEQ ID NO: 181331 - DNA, 15 bp, Homo sapiens
ccacccttttttttt

SEQ ID NO: 181332 - DNA, 15 bp, Homo sapiens
caccctttttttttc

SEQ ID NO: 181333 - DNA, 15 bp, Homo sapiens
accctttttttttct

SEQ ID NO: 181334 - DNA, 15 bp, Homo sapiens
ccctttttttttctg

SEQ ID NO: 181335 - DNA, 15 bp, Homo sapiens
cctttttttttctgg

SEQ ID NO: 181336 - DNA, 15 bp, Homo sapiens
ctttttttttctggg

SEQ ID NO: 181337 - DNA, 15 bp, Homo sapiens
tttttttttctggga

SEQ ID NO: 181338 - DNA, 15 bp, Homo sapiens
ttttttttctgggaa

SEQ ID NO: 181339 - DNA, 15 bp, Homo sapiens
tttttttctgggaaa

SEQ ID NO: 181340 - DNA, 15 bp, Homo sapiens
ttttttctgggaaag

SEQ ID NO: 181341 - DNA, 15 bp, Homo sapiens
tttttctgggaaagg

SEQ ID NO: 181342 - DNA, 15 bp, Homo sapiens
ttttctgggaaagga

SEQ ID NO: 181343 - DNA, 15 bp, Homo sapiens
tttctgggaaaggag

SEQ ID NO: 181344 - DNA, 15 bp, Homo sapiens
ttctgggaaaggaga

SEQ ID NO: 181345 - DNA, 15 bp, Homo sapiens
tctgggaaaggagag

SEQ ID NO: 181346 - DNA, 15 bp, Homo sapiens
ctgggaaaggagagc

SEQ ID NO: 181347 - DNA, 15 bp, Homo sapiens
tgggaaaggagagca

SEQ ID NO: 181348 - DNA, 15 bp, Homo sapiens
gggaaaggagagcaa

SEQ ID NO: 181349 - DNA, 15 bp, Homo sapiens
ggaaaggagagcaag

SEQ ID NO: 181350 - DNA, 15 bp, Homo sapiens
gaaaggagagcaaga

SEQ ID NO: 181351 - DNA, 15 bp, Homo sapiens
aaaggagagcaagag

SEQ ID NO: 181352 - DNA, 15 bp, Homo sapiens
aaggagagcaagagg

SEQ ID NO: 181353 - DNA, 15 bp, Homo sapiens
aggagagcaagaggt

SEQ ID NO: 181354 - DNA, 15 bp, Homo sapiens
ggagagcaagaggtc

SEQ ID NO: 181355 - DNA, 15 bp, Homo sapiens
gagagcaagaggtcc

SEQ ID NO: 181356 - DNA, 15 bp, Homo sapiens
agagcaagaggtccc

SEQ ID NO: 181357 - DNA, 15 bp, Homo sapiens
gagcaagaggtcccg

SEQ ID NO: 181358 - DNA, 15 bp, Homo sapiens
agcaagaggtcccga

SEQ ID NO: 181359 - DNA, 15 bp, Homo sapiens
gcaagaggtcccgag

SEQ ID NO: 181360 - DNA, 15 bp, Homo sapiens
caagaggtcccgagt

SEQ ID NO: 181361 - DNA, 15 bp, Homo sapiens
aagaggtcccgagtc

SEQ ID NO: 181362 - DNA, 15 bp, Homo sapiens
agaggtcccgagtcc

SEQ ID NO: 181363 - DNA, 15 bp, Homo sapiens
gaggtcccgagtccc

SEQ ID NO: 181364 - DNA, 15 bp, Homo sapiens
aggtcccgagtcccc

SEQ ID NO: 181365 - DNA, 15 bp, Homo sapiens
ggtcccgagtcccct

SEQ ID NO: 181366 - DNA, 15 bp, Homo sapiens
gtcccgagtcccctc

SEQ ID NO: 181367 - DNA, 15 bp, Homo sapiens
tcccgagtcccctcc

SEQ ID NO: 181368 - DNA, 15 bp, Homo sapiens
cccgagtcccctcct

SEQ ID NO: 181369 - DNA, 15 bp, Homo sapiens
ccgagtcccctccta

SEQ ID NO: 181370 - DNA, 15 bp, Homo sapiens
cgagtcccctcctag

SEQ ID NO: 181371 - DNA, 15 bp, Homo sapiens
gagtcccctcctagt

SEQ ID NO: 181372 - DNA, 15 bp, Homo sapiens
agtcccctcctagtc

SEQ ID NO: 181373 - DNA, 15 bp, Homo sapiens
gtcccctcctagtct

SEQ ID NO: 181374 - DNA, 15 bp, Homo sapiens
tcccctcctagtctt

SEQ ID NO: 181375 - DNA, 15 bp, Homo sapiens
cccctcctagtcttt

SEQ ID NO: 181376 - DNA, 15 bp, Homo sapiens
ccctcctagtctttc

SEQ ID NO: 181377 - DNA, 15 bp, Homo sapiens
cctcctagtctttca

SEQ ID NO: 181378 - DNA, 15 bp, Homo sapiens
ctcctagtctttcat

SEQ ID NO: 181379 - DNA, 15 bp, Homo sapiens
tcctagtctttcatc

SEQ ID NO: 181380 - DNA, 15 bp, Homo sapiens
cctagtctttcatcc

SEQ ID NO: 181381 - DNA, 15 bp, Homo sapiens
ctagtctttcatcct

SEQ ID NO: 181382 - DNA, 15 bp, Homo sapiens
tagtctttcatcctg

SEQ ID NO: 181383 - DNA, 15 bp, Homo sapiens
agtctttcatcctga

SEQ ID NO: 181384 - DNA, 15 bp, Homo sapiens
gtctttcatcctgaa

SEQ ID NO: 181385 - DNA, 15 bp, Homo sapiens
tctttcatcctgaat

SEQ ID NO: 181386 - DNA, 15 bp, Homo sapiens
ctttcatcctgaatt

SEQ ID NO: 181387 - DNA, 15 bp, Homo sapiens
tttcatcctgaattt

SEQ ID NO: 181388 - DNA, 15 bp, Homo sapiens
ttcatcctgaatttg

SEQ ID NO: 181389 - DNA, 15 bp, Homo sapiens
tcatcctgaatttgc

SEQ ID NO: 181390 - DNA, 15 bp, Homo sapiens
catcctgaatttgca

SEQ ID NO: 181391 - DNA, 15 bp, Homo sapiens
atcctgaatttgcac

SEQ ID NO: 181392 - DNA, 15 bp, Homo sapiens
tcctgaatttgcaca

SEQ ID NO: 181393 - DNA, 15 bp, Homo sapiens
cctgaatttgcacag

SEQ ID NO: 181394 - DNA, 15 bp, Homo sapiens
ctgaatttgcacaga

SEQ ID NO: 181395 - DNA, 15 bp, Homo sapiens
tgaatttgcacagag

SEQ ID NO: 181396 - DNA, 15 bp, Homo sapiens
gaatttgcacagagg

SEQ ID NO: 181397 - DNA, 15 bp, Homo sapiens
aatttgcacagagga

SEQ ID NO: 181398 - DNA, 15 bp, Homo sapiens
atttgcacagaggaa

SEQ ID NO: 181399 - DNA, 15 bp, Homo sapiens
tttgcacagaggaaa

SEQ ID NO: 181400 - DNA, 15 bp, Homo sapiens
ttgcacagaggaaag

SEQ ID NO: 181401 - DNA, 15 bp, Homo sapiens
tgcacagaggaaagc

SEQ ID NO: 181402 - DNA, 15 bp, Homo sapiens
gcacagaggaaagcg

SEQ ID NO: 181403 - DNA, 15 bp, Homo sapiens
cacagaggaaagcgg

SEQ ID NO: 181404 - DNA, 15 bp, Homo sapiens
acagaggaaagcggg

SEQ ID NO: 181405 - DNA, 15 bp, Homo sapiens
cagaggaaagcgggt

SEQ ID NO: 181406 - DNA, 15 bp, Homo sapiens
agaggaaagcgggtg

SEQ ID NO: 181407 - DNA, 15 bp, Homo sapiens
gaggaaagcgggtgc

SEQ ID NO: 181408 - DNA, 15 bp, Homo sapiens
aggaaagcgggtgcc

SEQ ID NO: 181409 - DNA, 15 bp, Homo sapiens
ggaaagcgggtgccc

SEQ ID NO: 181410 - DNA, 15 bp, Homo sapiens
gaaagcgggtgcccg

SEQ ID NO: 181411 - DNA, 15 bp, Homo sapiens
aaagcgggtgcccgg

SEQ ID NO: 181412 - DNA, 15 bp, Homo sapiens
aagcgggtgcccggc

SEQ ID NO: 181413 - DNA, 15 bp, Homo sapiens
agcgggtgcccggca

SEQ ID NO: 181414 - DNA, 15 bp, Homo sapiens
gcgggtgcccggcat

SEQ ID NO: 181415 - DNA, 15 bp, Homo sapiens
cgggtgcccggcatg

SEQ ID NO: 181416 - DNA, 15 bp, Homo sapiens
gggtgcccggcatgg

SEQ ID NO: 181417 - DNA, 15 bp, Homo sapiens
ggtgcccggcatggc

SEQ ID NO: 181418 - DNA, 15 bp, Homo sapiens
gtgcccggcatggcc

SEQ ID NO: 181419 - DNA, 15 bp, Homo sapiens
tgcccggcatggcca

SEQ ID NO: 181420 - DNA, 15 bp, Homo sapiens
gcccggcatggccat

SEQ ID NO: 181421 - DNA, 15 bp, Homo sapiens
cccggcatggccatc

SEQ ID NO: 181422 - DNA, 15 bp, Homo sapiens
ccggcatggccatcc

SEQ ID NO: 181423 - DNA, 15 bp, Homo sapiens
cggcatggccatcct

SEQ ID NO: 181424 - DNA, 15 bp, Homo sapiens
ggcatggccatcctg

SEQ ID NO: 181425 - DNA, 15 bp, Homo sapiens
gcatggccatcctga

SEQ ID NO: 181426 - DNA, 15 bp, Homo sapiens
catggccatcctgat

SEQ ID NO: 181427 - DNA, 15 bp, Homo sapiens
atggccatcctgatg

SEQ ID NO: 181428 - DNA, 15 bp, Homo sapiens
tggccatcctgatgt

SEQ ID NO: 181429 - DNA, 15 bp, Homo sapiens
ggccatcctgatgtt

SEQ ID NO: 181430 - DNA, 15 bp, Homo sapiens
gccatcctgatgttg

SEQ ID NO: 181431 - DNA, 15 bp, Homo sapiens
ccatcctgatgttgc

SEQ ID NO: 181432 - DNA, 15 bp, Homo sapiens
catcctgatgttgct

SEQ ID NO: 181433 - DNA, 15 bp, Homo sapiens
atcctgatgttgctg

SEQ ID NO: 181434 - DNA, 15 bp, Homo sapiens
tcctgatgttgctgg

SEQ ID NO: 181435 - DNA, 15 bp, Homo sapiens
cctgatgttgctggc

SEQ ID NO: 181436 - DNA, 15 bp, Homo sapiens
ctgatgttgctggcg

SEQ ID NO: 181437 - DNA, 15 bp, Homo sapiens
tgatgttgctggcgg

SEQ ID NO: 181438 - DNA, 15 bp, Homo sapiens
gatgttgctggcggg

SEQ ID NO: 181439 - DNA, 15 bp, Homo sapiens
atgttgctggcggga

SEQ ID NO: 181440 - DNA, 15 bp, Homo sapiens
tgttgctggcgggat

SEQ ID NO: 181441 - DNA, 15 bp, Homo sapiens
gttgctggcgggatc

SEQ ID NO: 181442 - DNA, 15 bp, Homo sapiens
ttgctggcgggatcc

SEQ ID NO: 181443 - DNA, 15 bp, Homo sapiens
tgctggcgggatccc

SEQ ID NO: 181444 - DNA, 15 bp, Homo sapiens
gctggcgggatcccc

SEQ ID NO: 181445 - DNA, 15 bp, Homo sapiens
ctggcgggatcccca

SEQ ID NO: 181446 - DNA, 15 bp, Homo sapiens
tggcgggatccccat

SEQ ID NO: 181447 - DNA, 15 bp, Homo sapiens
ggcgggatccccatg

SEQ ID NO: 181448 - DNA, 15 bp, Homo sapiens
gcgggatccccatgc

SEQ ID NO: 181449 - DNA, 15 bp, Homo sapiens
cgggatccccatgca

SEQ ID NO: 181450 - DNA, 15 bp, Homo sapiens
gggatccccatgcac

SEQ ID NO: 181451 - DNA, 15 bp, Homo sapiens
ggatccccatgcacc

SEQ ID NO: 181452 - DNA, 15 bp, Homo sapiens
gatccccatgcacct

SEQ ID NO: 181453 - DNA, 15 bp, Homo sapiens
atccccatgcacctt

SEQ ID NO: 181454 - DNA, 15 bp, Homo sapiens
tccccatgcaccttg

SEQ ID NO: 181455 - DNA, 15 bp, Homo sapiens
ccccatgcaccttgt

SEQ ID NO: 181456 - DNA, 15 bp, Homo sapiens
cccatgcaccttgtc

SEQ ID NO: 181457 - DNA, 15 bp, Homo sapiens
ccatgcaccttgtcc

SEQ ID NO: 181458 - DNA, 15 bp, Homo sapiens
catgcaccttgtcct

SEQ ID NO: 181459 - DNA, 15 bp, Homo sapiens
atgcaccttgtcctt

SEQ ID NO: 181460 - DNA, 15 bp, Homo sapiens
tgcaccttgtccttc

SEQ ID NO: 181461 - DNA, 15 bp, Homo sapiens
gcaccttgtccttct

SEQ ID NO: 181462 - DNA, 15 bp, Homo sapiens
caccttgtccttctc

SEQ ID NO: 181463 - DNA, 15 bp, Homo sapiens
accttgtccttctcc

SEQ ID NO: 181464 - DNA, 15 bp, Homo sapiens
ccttgtccttctcca

SEQ ID NO: 181465 - DNA, 15 bp, Homo sapiens
cttgtccttctccac

SEQ ID NO: 181466 - DNA, 15 bp, Homo sapiens
ttgtccttctccact

SEQ ID NO: 181467 - DNA, 15 bp, Homo sapiens
tgtccttctccactg

SEQ ID NO: 181468 - DNA, 15 bp, Homo sapiens
gtccttctccactga

SEQ ID NO: 181469 - DNA, 15 bp, Homo sapiens
tccttctccactgat

SEQ ID NO: 181470 - DNA, 15 bp, Homo sapiens
ccttctccactgata

SEQ ID NO: 181471 - DNA, 15 bp, Homo sapiens
cttctccactgatac

SEQ ID NO: 181472 - DNA, 15 bp, Homo sapiens
ttctccactgatact

SEQ ID NO: 181473 - DNA, 15 bp, Homo sapiens
tctccactgatactg

SEQ ID NO: 181474 - DNA, 15 bp, Homo sapiens
ctccactgatactgg

SEQ ID NO: 181475 - DNA, 15 bp, Homo sapiens
tccactgatactggc

SEQ ID NO: 181476 - DNA, 15 bp, Homo sapiens
ccactgatactggca

SEQ ID NO: 181477 - DNA, 15 bp, Homo sapiens
cactgatactggcag

SEQ ID NO: 181478 - DNA, 15 bp, Homo sapiens
actgatactggcagc

SEQ ID NO: 181479 - DNA, 15 bp, Homo sapiens
ctgatactggcagct

SEQ ID NO: 181480 - DNA, 15 bp, Homo sapiens
tgatactggcagctc

SEQ ID NO: 181481 - DNA, 15 bp, Homo sapiens
gatactggcagctcg

SEQ ID NO: 181482 - DNA, 15 bp, Homo sapiens
atactggcagctcgg

SEQ ID NO: 181483 - DNA, 15 bp, Homo sapiens
tactggcagctcggc

SEQ ID NO: 181484 - DNA, 15 bp, Homo sapiens
actggcagctcggct

SEQ ID NO: 181485 - DNA, 15 bp, Homo sapiens
ctggcagctcggctc

SEQ ID NO: 181486 - DNA, 15 bp, Homo sapiens
tggcagctcggctcc

SEQ ID NO: 181487 - DNA, 15 bp, Homo sapiens
ggcagctcggctcct

SEQ ID NO: 181488 - DNA, 15 bp, Homo sapiens
gcagctcggctcctg

SEQ ID NO: 181489 - DNA, 15 bp, Homo sapiens
cagctcggctcctgg

SEQ ID NO: 181490 - DNA, 15 bp, Homo sapiens
agctcggctcctgga

SEQ ID NO: 181491 - DNA, 15 bp, Homo sapiens
gctcggctcctggac

SEQ ID NO: 181492 - DNA, 15 bp, Homo sapiens
ctcggctcctggacc

SEQ ID NO: 181493 - DNA, 15 bp, Homo sapiens
tcggctcctggaccc

SEQ ID NO: 181494 - DNA, 15 bp, Homo sapiens
cggctcctggaccca

SEQ ID NO: 181495 - DNA, 15 bp, Homo sapiens
ggctcctggacccaa

SEQ ID NO: 181496 - DNA, 15 bp, Homo sapiens
gctcctggacccaag

SEQ ID NO: 181497 - DNA, 15 bp, Homo sapiens
ctcctggacccaaga

SEQ ID NO: 181498 - DNA, 15 bp, Homo sapiens
tcctggacccaagat

SEQ ID NO: 181499 - DNA, 15 bp, Homo sapiens
cctggacccaagatc

SEQ ID NO: 181500 - DNA, 15 bp, Homo sapiens
ctggacccaagatcc

SEQ ID NO: 181501 - DNA, 15 bp, Homo sapiens
tggacccaagatccc

SEQ ID NO: 181502 - DNA, 15 bp, Homo sapiens
ggacccaagatccct

SEQ ID NO: 181503 - DNA, 15 bp, Homo sapiens
gacccaagatccctt

SEQ ID NO: 181504 - DNA, 15 bp, Homo sapiens
acccaagatcccttg

SEQ ID NO: 181505 - DNA, 15 bp, Homo sapiens
cccaagatcccttga

SEQ ID NO: 181506 - DNA, 15 bp, Homo sapiens
ccaagatcccttgag

SEQ ID NO: 181507 - DNA, 15 bp, Homo sapiens
caagatcccttgagt

SEQ ID NO: 181508 - DNA, 15 bp, Homo sapiens
aagatcccttgagtg

SEQ ID NO: 181509 - DNA, 15 bp, Homo sapiens
agatcccttgagtgg

SEQ ID NO: 181510 - DNA, 15 bp, Homo sapiens
gatcccttgagtgga

SEQ ID NO: 181511 - DNA, 15 bp, Homo sapiens
atcccttgagtggaa

SEQ ID NO: 181512 - DNA, 15 bp, Homo sapiens
tcccttgagtggaat

SEQ ID NO: 181513 - DNA, 15 bp, Homo sapiens
cccttgagtggaatt

SEQ ID NO: 181514 - DNA, 15 bp, Homo sapiens
ccttgagtggaattc

SEQ ID NO: 181515 - DNA, 15 bp, Homo sapiens
cttgagtggaattct

SEQ ID NO: 181516 - DNA, 15 bp, Homo sapiens
ttgagtggaattctg

SEQ ID NO: 181517 - DNA, 15 bp, Homo sapiens
tgagtggaattctgc

SEQ ID NO: 181518 - DNA, 15 bp, Homo sapiens
gagtggaattctgca

SEQ ID NO: 181519 - DNA, 15 bp, Homo sapiens
agtggaattctgcag

SEQ ID NO: 181520 - DNA, 15 bp, Homo sapiens
gtggaattctgcagt

SEQ ID NO: 181521 - DNA, 15 bp, Homo sapiens
tggaattctgcagtg

SEQ ID NO: 181522 - DNA, 15 bp, Homo sapiens
ggaattctgcagtgc

SEQ ID NO: 181523 - DNA, 15 bp, Homo sapiens
gaattctgcagtgca

SEQ ID NO: 181524 - DNA, 15 bp, Homo sapiens
aattctgcagtgcaa

SEQ ID NO: 181525 - DNA, 15 bp, Homo sapiens
attctgcagtgcaag

SEQ ID NO: 181526 - DNA, 15 bp, Homo sapiens
ttctgcagtgcaaga

SEQ ID NO: 181527 - DNA, 15 bp, Homo sapiens
tctgcagtgcaagag

SEQ ID NO: 181528 - DNA, 15 bp, Homo sapiens
ctgcagtgcaagagc

SEQ ID NO: 181529 - DNA, 15 bp, Homo sapiens
tgcagtgcaagagcc

SEQ ID NO: 181530 - DNA, 15 bp, Homo sapiens
gcagtgcaagagccc

SEQ ID NO: 181531 - DNA, 15 bp, Homo sapiens
cagtgcaagagccct

SEQ ID NO: 181532 - DNA, 15 bp, Homo sapiens
agtgcaagagccctt

SEQ ID NO: 181533 - DNA, 15 bp, Homo sapiens
gtgcaagagcccttc

SEQ ID NO: 181534 - DNA, 15 bp, Homo sapiens
tgcaagagcccttcg

SEQ ID NO: 181535 - DNA, 15 bp, Homo sapiens
gcaagagcccttcgt

SEQ ID NO: 181536 - DNA, 15 bp, Homo sapiens
caagagcccttcgtg

SEQ ID NO: 181537 - DNA, 15 bp, Homo sapiens
aagagcccttcgtgg

SEQ ID NO: 181538 - DNA, 15 bp, Homo sapiens
agagcccttcgtggg

SEQ ID NO: 181539 - DNA, 15 bp, Homo sapiens
gagcccttcgtggga

SEQ ID NO: 181540 - DNA, 15 bp, Homo sapiens
agcccttcgtgggag

SEQ ID NO: 181541 - DNA, 15 bp, Homo sapiens
gcccttcgtgggagc

SEQ ID NO: 181542 - DNA, 15 bp, Homo sapiens
cccttcgtgggagct

SEQ ID NO: 181543 - DNA, 15 bp, Homo sapiens
ccttcgtgggagctg

SEQ ID NO: 181544 - DNA, 15 bp, Homo sapiens
cttcgtgggagctgt

SEQ ID NO: 181545 - DNA, 15 bp, Homo sapiens
ttcgtgggagctgtc

SEQ ID NO: 181546 - DNA, 15 bp, Homo sapiens
tcgtgggagctgtcc

SEQ ID NO: 181547 - DNA, 15 bp, Homo sapiens
cgtgggagctgtccc

SEQ ID NO: 181548 - DNA, 15 bp, Homo sapiens
gtgggagctgtccca

SEQ ID NO: 181549 - DNA, 15 bp, Homo sapiens
tgggagctgtcccat

SEQ ID NO: 181550 - DNA, 15 bp, Homo sapiens
gggagctgtcccatg

SEQ ID NO: 181551 - DNA, 15 bp, Homo sapiens
ggagctgtcccatgt

SEQ ID NO: 181552 - DNA, 15 bp, Homo sapiens
gagctgtcccatgtt

SEQ ID NO: 181553 - DNA, 15 bp, Homo sapiens
agctgtcccatgttt

SEQ ID NO: 181554 - DNA, 15 bp, Homo sapiens
gctgtcccatgtttc

SEQ ID NO: 181555 - DNA, 15 bp, Homo sapiens
ctgtcccatgtttcc

SEQ ID NO: 181556 - DNA, 15 bp, Homo sapiens
tgtcccatgtttcca

SEQ ID NO: 181557 - DNA, 15 bp, Homo sapiens
gtcccatgtttccat

SEQ ID NO: 181558 - DNA, 15 bp, Homo sapiens
tcccatgtttccatg

SEQ ID NO: 181559 - DNA, 15 bp, Homo sapiens
cccatgtttccatgg

SEQ ID NO: 181560 - DNA, 15 bp, Homo sapiens
ccatgtttccatggt

SEQ ID NO: 181561 - DNA, 15 bp, Homo sapiens
catgtttccatggtc

SEQ ID NO: 181562 - DNA, 15 bp, Homo sapiens
atgtttccatggtcc

SEQ ID NO: 181563 - DNA, 15 bp, Homo sapiens
tgtttccatggtccc

SEQ ID NO: 181564 - DNA, 15 bp, Homo sapiens
gtttccatggtcccc

SEQ ID NO: 181565 - DNA, 15 bp, Homo sapiens
tttccatggtcccca

SEQ ID NO: 181566 - DNA, 15 bp, Homo sapiens
ttccatggtccccag

SEQ ID NO: 181567 - DNA, 15 bp, Homo sapiens
tccatggtccccagt

SEQ ID NO: 181568 - DNA, 15 bp, Homo sapiens
ccatggtccccagtc

SEQ ID NO: 181569 - DNA, 15 bp, Homo sapiens
catggtccccagtct

SEQ ID NO: 181570 - DNA, 15 bp, Homo sapiens
atggtccccagtctc

SEQ ID NO: 181571 - DNA, 15 bp, Homo sapiens
tggtccccagtctcc

SEQ ID NO: 181572 - DNA, 15 bp, Homo sapiens
ggtccccagtctccc

SEQ ID NO: 181573 - DNA, 15 bp, Homo sapiens
gtccccagtctcccc

SEQ ID NO: 181574 - DNA, 15 bp, Homo sapiens
tccccagtctcccct

SEQ ID NO: 181575 - DNA, 15 bp, Homo sapiens
ccccagtctcccctc

SEQ ID NO: 181576 - DNA, 15 bp, Homo sapiens
cccagtctcccctcc

SEQ ID NO: 181577 - DNA, 15 bp, Homo sapiens
ccagtctcccctcca

SEQ ID NO: 181578 - DNA, 15 bp, Homo sapiens
cagtctcccctccac

SEQ ID NO: 181579 - DNA, 15 bp, Homo sapiens
agtctcccctccact

SEQ ID NO: 181580 - DNA, 15 bp, Homo sapiens
gtctcccctccactt

SEQ ID NO: 181581 - DNA, 15 bp, Homo sapiens
tctcccctccacttg

SEQ ID NO: 181582 - DNA, 15 bp, Homo sapiens
ctcccctccacttgg

SEQ ID NO: 181583 - DNA, 15 bp, Homo sapiens
tcccctccacttggt

SEQ ID NO: 181584 - DNA, 15 bp, Homo sapiens
cccctccacttggtg

SEQ ID NO: 181585 - DNA, 15 bp, Homo sapiens
ccctccacttggtgg

SEQ ID NO: 181586 - DNA, 15 bp, Homo sapiens
cctccacttggtggg

SEQ ID NO: 181587 - DNA, 15 bp, Homo sapiens
ctccacttggtgggg

SEQ ID NO: 181588 - DNA, 15 bp, Homo sapiens
tccacttggtggggt

SEQ ID NO: 181589 - DNA, 15 bp, Homo sapiens
ccacttggtggggtc

SEQ ID NO: 181590 - DNA, 15 bp, Homo sapiens
cacttggtggggtca

SEQ ID NO: 181591 - DNA, 15 bp, Homo sapiens
acttggtggggtcac

SEQ ID NO: 181592 - DNA, 15 bp, Homo sapiens
cttggtggggtcacc

SEQ ID NO: 181593 - DNA, 15 bp, Homo sapiens
ttggtggggtcacca

SEQ ID NO: 181594 - DNA, 15 bp, Homo sapiens
tggtggggtcaccaa

SEQ ID NO: 181595 - DNA, 15 bp, Homo sapiens
ggtggggtcaccaac

SEQ ID NO: 181596 - DNA, 15 bp, Homo sapiens
gtggggtcaccaact

SEQ ID NO: 181597 - DNA, 15 bp, Homo sapiens
tggggtcaccaacta

SEQ ID NO: 181598 - DNA, 15 bp, Homo sapiens
ggggtcaccaactac

SEQ ID NO: 181599 - DNA, 15 bp, Homo sapiens
gggtcaccaactact

SEQ ID NO: 181600 - DNA, 15 bp, Homo sapiens
ggtcaccaactactc

SEQ ID NO: 181601 - DNA, 15 bp, Homo sapiens
gtcaccaactactca

SEQ ID NO: 181602 - DNA, 15 bp, Homo sapiens
tcaccaactactcac

SEQ ID NO: 181603 - DNA, 15 bp, Homo sapiens
caccaactactcacc

SEQ ID NO: 181604 - DNA, 15 bp, Homo sapiens
accaactactcacca

SEQ ID NO: 181605 - DNA, 15 bp, Homo sapiens
ccaactactcaccag

SEQ ID NO: 181606 - DNA, 15 bp, Homo sapiens
caactactcaccaga

SEQ ID NO: 181607 - DNA, 15 bp, Homo sapiens
aactactcaccagaa

SEQ ID NO: 181608 - DNA, 15 bp, Homo sapiens
actactcaccagaag

SEQ ID NO: 181609 - DNA, 15 bp, Homo sapiens
ctactcaccagaagg

SEQ ID NO: 181610 - DNA, 15 bp, Homo sapiens
tactcaccagaaggg

SEQ ID NO: 181611 - DNA, 15 bp, Homo sapiens
actcaccagaagggg

SEQ ID NO: 181612 - DNA, 15 bp, Homo sapiens
ctcaccagaaggggg

SEQ ID NO: 181613 - DNA, 15 bp, Homo sapiens
tcaccagaagggggc

SEQ ID NO: 181614 - DNA, 15 bp, Homo sapiens
caccagaagggggct

SEQ ID NO: 181615 - DNA, 15 bp, Homo sapiens
accagaagggggctt

SEQ ID NO: 181616 - DNA, 15 bp, Homo sapiens
ccagaagggggctta

SEQ ID NO: 181617 - DNA, 15 bp, Homo sapiens
cagaagggggcttac

SEQ ID NO: 181618 - DNA, 15 bp, Homo sapiens
agaagggggcttacc

SEQ ID NO: 181619 - DNA, 15 bp, Homo sapiens
gaagggggcttacca

SEQ ID NO: 181620 - DNA, 15 bp, Homo sapiens
aagggggcttaccaa

SEQ ID NO: 181621 - DNA, 15 bp, Homo sapiens
agggggcttaccaag

SEQ ID NO: 181622 - DNA, 15 bp, Homo sapiens
gggggcttaccaaga

SEQ ID NO: 181623 - DNA, 15 bp, Homo sapiens
ggggcttaccaagaa

SEQ ID NO: 181624 - DNA, 15 bp, Homo sapiens
gggcttaccaagaaa

SEQ ID NO: 181625 - DNA, 15 bp, Homo sapiens
ggcttaccaagaaag

SEQ ID NO: 181626 - DNA, 15 bp, Homo sapiens
gcttaccaagaaagc

SEQ ID NO: 181627 - DNA, 15 bp, Homo sapiens
cttaccaagaaagcc

SEQ ID NO: 181628 - DNA, 15 bp, Homo sapiens
ttaccaagaaagccc

SEQ ID NO: 181629 - DNA, 15 bp, Homo sapiens
taccaagaaagccct

SEQ ID NO: 181630 - DNA, 15 bp, Homo sapiens
accaagaaagcccta

SEQ ID NO: 181631 - DNA, 15 bp, Homo sapiens
ccaagaaagccctaa

SEQ ID NO: 181632 - DNA, 15 bp, Homo sapiens
caagaaagccctaaa

SEQ ID NO: 181633 - DNA, 15 bp, Homo sapiens
aagaaagccctaaaa

SEQ ID NO: 181634 - DNA, 15 bp, Homo sapiens
agaaagccctaaaaa

SEQ ID NO: 181635 - DNA, 15 bp, Homo sapiens
gaaagccctaaaaag

SEQ ID NO: 181636 - DNA, 15 bp, Homo sapiens
aaagccctaaaaagc

SEQ ID NO: 181637 - DNA, 15 bp, Homo sapiens
aagccctaaaaagct

SEQ ID NO: 181638 - DNA, 15 bp, Homo sapiens
agccctaaaaagctg

SEQ ID NO: 181639 - DNA, 15 bp, Homo sapiens
gccctaaaaagctgt

SEQ ID NO: 181640 - DNA, 15 bp, Homo sapiens
ccctaaaaagctgtt

SEQ ID NO: 181641 - DNA, 15 bp, Homo sapiens
cctaaaaagctgttg

SEQ ID NO: 181642 - DNA, 15 bp, Homo sapiens
ctaaaaagctgttga

SEQ ID NO: 181643 - DNA, 15 bp, Homo sapiens
taaaaagctgttgac

SEQ ID NO: 181644 - DNA, 15 bp, Homo sapiens
aaaaagctgttgact

SEQ ID NO: 181645 - DNA, 15 bp, Homo sapiens
aaaagctgttgactt

SEQ ID NO: 181646 - DNA, 15 bp, Homo sapiens
aaagctgttgactta

SEQ ID NO: 181647 - DNA, 15 bp, Homo sapiens
aagctgttgacttat

SEQ ID NO: 181648 - DNA, 15 bp, Homo sapiens
agctgttgacttatc

SEQ ID NO: 181649 - DNA, 15 bp, Homo sapiens
gctgttgacttatct

SEQ ID NO: 181650 - DNA, 15 bp, Homo sapiens
ctgttgacttatctg

SEQ ID NO: 181651 - DNA, 15 bp, Homo sapiens
tgttgacttatctgc

SEQ ID NO: 181652 - DNA, 15 bp, Homo sapiens
gttgacttatctgcg

SEQ ID NO: 181653 - DNA, 15 bp, Homo sapiens
ttgacttatctgcgc

SEQ ID NO: 181654 - DNA, 15 bp, Homo sapiens
tgacttatctgcgct

SEQ ID NO: 181655 - DNA, 15 bp, Homo sapiens
gacttatctgcgctt

SEQ ID NO: 181656 - DNA, 15 bp, Homo sapiens
acttatctgcgcttg

SEQ ID NO: 181657 - DNA, 15 bp, Homo sapiens
cttatctgcgcttgt

SEQ ID NO: 181658 - DNA, 15 bp, Homo sapiens
ttatctgcgcttgtt

SEQ ID NO: 181659 - DNA, 15 bp, Homo sapiens
tatctgcgcttgttc

SEQ ID NO: 181660 - DNA, 15 bp, Homo sapiens
atctgcgcttgttcc

SEQ ID NO: 181661 - DNA, 15 bp, Homo sapiens
tctgcgcttgttcca

SEQ ID NO: 181662 - DNA, 15 bp, Homo sapiens
ctgcgcttgttccaa

SEQ ID NO: 181663 - DNA, 15 bp, Homo sapiens
tgcgcttgttccaac

SEQ ID NO: 181664 - DNA, 15 bp, Homo sapiens
gcgcttgttccaact

SEQ ID NO: 181665 - DNA, 15 bp, Homo sapiens
cgcttgttccaactc

SEQ ID NO: 181666 - DNA, 15 bp, Homo sapiens
gcttgttccaactct

SEQ ID NO: 181667 - DNA, 15 bp, Homo sapiens
cttgttccaactctt

SEQ ID NO: 181668 - DNA, 15 bp, Homo sapiens
ttgttccaactctta

SEQ ID NO: 181669 - DNA, 15 bp, Homo sapiens
tgttccaactcttat

SEQ ID NO: 181670 - DNA, 15 bp, Homo sapiens
gttccaactcttatg

SEQ ID NO: 181671 - DNA, 15 bp, Homo sapiens
ttccaactcttatgc

SEQ ID NO: 181672 - DNA, 15 bp, Homo sapiens
tccaactcttatgcc

SEQ ID NO: 181673 - DNA, 15 bp, Homo sapiens
ccaactcttatgccc

SEQ ID NO: 181674 - DNA, 15 bp, Homo sapiens
caactcttatgcccc

SEQ ID NO: 181675 - DNA, 15 bp, Homo sapiens
aactcttatgccccc

SEQ ID NO: 181676 - DNA, 15 bp, Homo sapiens
actcttatgccccca

SEQ ID NO: 181677 - DNA, 15 bp, Homo sapiens
ctcttatgcccccaa

SEQ ID NO: 181678 - DNA, 15 bp, Homo sapiens
tcttatgcccccaac

SEQ ID NO: 181679 - DNA, 15 bp, Homo sapiens
cttatgcccccaacc

SEQ ID NO: 181680 - DNA, 15 bp, Homo sapiens
ttatgcccccaacct

SEQ ID NO: 181681 - DNA, 15 bp, Homo sapiens
tatgcccccaacctg

SEQ ID NO: 181682 - DNA, 15 bp, Homo sapiens
atgcccccaacctgc

SEQ ID NO: 181683 - DNA, 15 bp, Homo sapiens
tgcccccaacctgcc

SEQ ID NO: 181684 - DNA, 15 bp, Homo sapiens
gcccccaacctgccc

SEQ ID NO: 181685 - DNA, 15 bp, Homo sapiens
cccccaacctgccct

SEQ ID NO: 181686 - DNA, 15 bp, Homo sapiens
ccccaacctgcccta

SEQ ID NO: 181687 - DNA, 15 bp, Homo sapiens
cccaacctgccctac

SEQ ID NO: 181688 - DNA, 15 bp, Homo sapiens
ccaacctgccctacc

SEQ ID NO: 181689 - DNA, 15 bp, Homo sapiens
caacctgccctacca

SEQ ID NO: 181690 - DNA, 15 bp, Homo sapiens
aacctgccctaccac

SEQ ID NO: 181691 - DNA, 15 bp, Homo sapiens
acctgccctaccacc

SEQ ID NO: 181692 - DNA, 15 bp, Homo sapiens
cctgccctaccacca

SEQ ID NO: 181693 - DNA, 15 bp, Homo sapiens
ctgccctaccaccac

SEQ ID NO: 181694 - DNA, 15 bp, Homo sapiens
tgccctaccaccacc

SEQ ID NO: 181695 - DNA, 15 bp, Homo sapiens
gccctaccaccacca

SEQ ID NO: 181696 - DNA, 15 bp, Homo sapiens
ccctaccaccaccac

SEQ ID NO: 181697 - DNA, 15 bp, Homo sapiens
cctaccaccaccacg

SEQ ID NO: 181698 - DNA, 15 bp, Homo sapiens
ctaccaccaccacgc

SEQ ID NO: 181699 - DNA, 15 bp, Homo sapiens
taccaccaccacgcg

SEQ ID NO: 181700 - DNA, 15 bp, Homo sapiens
accaccaccacgcgc

SEQ ID NO: 181701 - DNA, 15 bp, Homo sapiens
ccaccaccacgcgct

SEQ ID NO: 181702 - DNA, 15 bp, Homo sapiens
caccaccacgcgctc

SEQ ID NO: 181703 - DNA, 15 bp, Homo sapiens
accaccacgcgctca

SEQ ID NO: 181704 - DNA, 15 bp, Homo sapiens
ccaccacgcgctcag

SEQ ID NO: 181705 - DNA, 15 bp, Homo sapiens
caccacgcgctcagc

SEQ ID NO: 181706 - DNA, 15 bp, Homo sapiens
accacgcgctcagcc

SEQ ID NO: 181707 - DNA, 15 bp, Homo sapiens
ccacgcgctcagcct

SEQ ID NO: 181708 - DNA, 15 bp, Homo sapiens
cacgcgctcagcctg

SEQ ID NO: 181709 - DNA, 15 bp, Homo sapiens
acgcgctcagcctga

SEQ ID NO: 181710 - DNA, 15 bp, Homo sapiens
cgcgctcagcctgat

SEQ ID NO: 181711 - DNA, 15 bp, Homo sapiens
gcgctcagcctgatg

SEQ ID NO: 181712 - DNA, 15 bp, Homo sapiens
cgctcagcctgatgt

SEQ ID NO: 181713 - DNA, 15 bp, Homo sapiens
gctcagcctgatgtg

SEQ ID NO: 181714 - DNA, 15 bp, Homo sapiens
ctcagcctgatgtgt

SEQ ID NO: 181715 - DNA, 15 bp, Homo sapiens
tcagcctgatgtgtt

SEQ ID NO: 181716 - DNA, 15 bp, Homo sapiens
cagcctgatgtgttt

SEQ ID NO: 181717 - DNA, 15 bp, Homo sapiens
agcctgatgtgttta

SEQ ID NO: 181718 - DNA, 15 bp, Homo sapiens
gcctgatgtgtttac

SEQ ID NO: 181719 - DNA, 15 bp, Homo sapiens
cctgatgtgtttaca

SEQ ID NO: 181720 - DNA, 15 bp, Homo sapiens
ctgatgtgtttacat

SEQ ID NO: 181721 - DNA, 15 bp, Homo sapiens
tgatgtgtttacatg

SEQ ID NO: 181722 - DNA, 15 bp, Homo sapiens
gatgtgtttacatgg

SEQ ID NO: 181723 - DNA, 15 bp, Homo sapiens
atgtgtttacatggt

SEQ ID NO: 181724 - DNA, 15 bp, Homo sapiens
tgtgtttacatggta

SEQ ID NO: 181725 - DNA, 15 bp, Homo sapiens
gtgtttacatggtac

SEQ ID NO: 181726 - DNA, 15 bp, Homo sapiens
tgtttacatggtact

SEQ ID NO: 181727 - DNA, 15 bp, Homo sapiens
gtttacatggtactg

SEQ ID NO: 181728 - DNA, 15 bp, Homo sapiens
tttacatggtactgt

SEQ ID NO: 181729 - DNA, 15 bp, Homo sapiens
ttacatggtactgta

SEQ ID NO: 181730 - DNA, 15 bp, Homo sapiens
tacatggtactgtat

SEQ ID NO: 181731 - DNA, 15 bp, Homo sapiens
acatggtactgtatg

SEQ ID NO: 181732 - DNA, 15 bp, Homo sapiens
catggtactgtatgt

SEQ ID NO: 181733 - DNA, 15 bp, Homo sapiens
atggtactgtatgta

SEQ ID NO: 181734 - DNA, 15 bp, Homo sapiens
tggtactgtatgtat

SEQ ID NO: 181735 - DNA, 15 bp, Homo sapiens
ggtactgtatgtatg

SEQ ID NO: 181736 - DNA, 15 bp, Homo sapiens
gtactgtatgtatgg

SEQ ID NO: 181737 - DNA, 15 bp, Homo sapiens
tactgtatgtatggg

SEQ ID NO: 181738 - DNA, 15 bp, Homo sapiens
actgtatgtatggga

SEQ ID NO: 181739 - DNA, 15 bp, Homo sapiens
ctgtatgtatgggag

SEQ ID NO: 181740 - DNA, 15 bp, Homo sapiens
tgtatgtatgggaga

SEQ ID NO: 181741 - DNA, 15 bp, Homo sapiens
gtatgtatgggagag

SEQ ID NO: 181742 - DNA, 15 bp, Homo sapiens
tatgtatgggagagc

SEQ ID NO: 181743 - DNA, 15 bp, Homo sapiens
atgtatgggagagca

SEQ ID NO: 181744 - DNA, 15 bp, Homo sapiens
tgtatgggagagcag

SEQ ID NO: 181745 - DNA, 15 bp, Homo sapiens
gtatgggagagcaga

SEQ ID NO: 181746 - DNA, 15 bp, Homo sapiens
tatgggagagcagac

SEQ ID NO: 181747 - DNA, 15 bp, Homo sapiens
atgggagagcagact

SEQ ID NO: 181748 - DNA, 15 bp, Homo sapiens
tgggagagcagactg

SEQ ID NO: 181749 - DNA, 15 bp, Homo sapiens
gggagagcagactgc

SEQ ID NO: 181750 - DNA, 15 bp, Homo sapiens
ggagagcagactgca

SEQ ID NO: 181751 - DNA, 15 bp, Homo sapiens
gagagcagactgcac

SEQ ID NO: 181752 - DNA, 15 bp, Homo sapiens
agagcagactgcacc

SEQ ID NO: 181753 - DNA, 15 bp, Homo sapiens
gagcagactgcaccc

SEQ ID NO: 181754 - DNA, 15 bp, Homo sapiens
agcagactgcaccct

SEQ ID NO: 181755 - DNA, 15 bp, Homo sapiens
gcagactgcaccctc

SEQ ID NO: 181756 - DNA, 15 bp, Homo sapiens
cagactgcaccctcc

SEQ ID NO: 181757 - DNA, 15 bp, Homo sapiens
agactgcaccctcca

SEQ ID NO: 181758 - DNA, 15 bp, Homo sapiens
gactgcaccctccag

SEQ ID NO: 181759 - DNA, 15 bp, Homo sapiens
actgcaccctccagc

SEQ ID NO: 181760 - DNA, 15 bp, Homo sapiens
ctgcaccctccagca

SEQ ID NO: 181761 - DNA, 15 bp, Homo sapiens
tgcaccctccagcaa

SEQ ID NO: 181762 - DNA, 15 bp, Homo sapiens
gcaccctccagcaac

SEQ ID NO: 181763 - DNA, 15 bp, Homo sapiens
caccctccagcaaca

SEQ ID NO: 181764 - DNA, 15 bp, Homo sapiens
accctccagcaacaa

SEQ ID NO: 181765 - DNA, 15 bp, Homo sapiens
ccctccagcaacaac

SEQ ID NO: 181766 - DNA, 15 bp, Homo sapiens
cctccagcaacaaca

SEQ ID NO: 181767 - DNA, 15 bp, Homo sapiens
ctccagcaacaacag

SEQ ID NO: 181768 - DNA, 15 bp, Homo sapiens
tccagcaacaacaga

SEQ ID NO: 181769 - DNA, 15 bp, Homo sapiens
ccagcaacaacagat

SEQ ID NO: 181770 - DNA, 15 bp, Homo sapiens
cagcaacaacagatg

SEQ ID NO: 181771 - DNA, 15 bp, Homo sapiens
agcaacaacagatga

SEQ ID NO: 181772 - DNA, 15 bp, Homo sapiens
gcaacaacagatgaa

SEQ ID NO: 181773 - DNA, 15 bp, Homo sapiens
caacaacagatgaaa

SEQ ID NO: 181774 - DNA, 15 bp, Homo sapiens
aacaacagatgaaag

SEQ ID NO: 181775 - DNA, 15 bp, Homo sapiens
acaacagatgaaagc

SEQ ID NO: 181776 - DNA, 15 bp, Homo sapiens
caacagatgaaagcc

SEQ ID NO: 181777 - DNA, 15 bp, Homo sapiens
aacagatgaaagcca

SEQ ID NO: 181778 - DNA, 15 bp, Homo sapiens
acagatgaaagccag

SEQ ID NO: 181779 - DNA, 15 bp, Homo sapiens
cagatgaaagccagt

SEQ ID NO: 181780 - DNA, 15 bp, Homo sapiens
agatgaaagccagtg

SEQ ID NO: 181781 - DNA, 15 bp, Homo sapiens
gatgaaagccagtga

SEQ ID NO: 181782 - DNA, 15 bp, Homo sapiens
atgaaagccagtgag

SEQ ID NO: 181783 - DNA, 15 bp, Homo sapiens
tgaaagccagtgagc

SEQ ID NO: 181784 - DNA, 15 bp, Homo sapiens
gaaagccagtgagcc

SEQ ID NO: 181785 - DNA, 15 bp, Homo sapiens
aaagccagtgagcct

SEQ ID NO: 181786 - DNA, 15 bp, Homo sapiens
aagccagtgagccta

SEQ ID NO: 181787 - DNA, 15 bp, Homo sapiens
agccagtgagcctac

SEQ ID NO: 181788 - DNA, 15 bp, Homo sapiens
gccagtgagcctact

SEQ ID NO: 181789 - DNA, 15 bp, Homo sapiens
ccagtgagcctacta

SEQ ID NO: 181790 - DNA, 15 bp, Homo sapiens
cagtgagcctactaa

SEQ ID NO: 181791 - DNA, 15 bp, Homo sapiens
agtgagcctactaac

SEQ ID NO: 181792 - DNA, 15 bp, Homo sapiens
gtgagcctactaacc

SEQ ID NO: 181793 - DNA, 15 bp, Homo sapiens
tgagcctactaaccg

SEQ ID NO: 181794 - DNA, 15 bp, Homo sapiens
gagcctactaaccgt

SEQ ID NO: 181795 - DNA, 15 bp, Homo sapiens
agcctactaaccgtg

SEQ ID NO: 181796 - DNA, 15 bp, Homo sapiens
gcctactaaccgtgc

SEQ ID NO: 181797 - DNA, 15 bp, Homo sapiens
cctactaaccgtgcc

SEQ ID NO: 181798 - DNA, 15 bp, Homo sapiens
ctactaaccgtgcca

SEQ ID NO: 181799 - DNA, 15 bp, Homo sapiens
tactaaccgtgccat

SEQ ID NO: 181800 - DNA, 15 bp, Homo sapiens
actaaccgtgccatc

SEQ ID NO: 181801 - DNA, 15 bp, Homo sapiens
ctaaccgtgccatct

SEQ ID NO: 181802 - DNA, 15 bp, Homo sapiens
taaccgtgccatctt

SEQ ID NO: 181803 - DNA, 15 bp, Homo sapiens
aaccgtgccatcttg

SEQ ID NO: 181804 - DNA, 15 bp, Homo sapiens
accgtgccatcttgc

SEQ ID NO: 181805 - DNA, 15 bp, Homo sapiens
ccgtgccatcttgca

SEQ ID NO: 181806 - DNA, 15 bp, Homo sapiens
cgtgccatcttgcaa

SEQ ID NO: 181807 - DNA, 15 bp, Homo sapiens
gtgccatcttgcaaa

SEQ ID NO: 181808 - DNA, 15 bp, Homo sapiens
tgccatcttgcaaac

SEQ ID NO: 181809 - DNA, 15 bp, Homo sapiens
gccatcttgcaaact

SEQ ID NO: 181810 - DNA, 15 bp, Homo sapiens
ccatcttgcaaacta

SEQ ID NO: 181811 - DNA, 15 bp, Homo sapiens
catcttgcaaactac

SEQ ID NO: 181812 - DNA, 15 bp, Homo sapiens
atcttgcaaactaca

SEQ ID NO: 181813 - DNA, 15 bp, Homo sapiens
tcttgcaaactacac

SEQ ID NO: 181814 - DNA, 15 bp, Homo sapiens
cttgcaaactacact

SEQ ID NO: 181815 - DNA, 15 bp, Homo sapiens
ttgcaaactacactt

SEQ ID NO: 181816 - DNA, 15 bp, Homo sapiens
tgcaaactacacttt

SEQ ID NO: 181817 - DNA, 15 bp, Homo sapiens
gcaaactacacttta

SEQ ID NO: 181818 - DNA, 15 bp, Homo sapiens
caaactacactttaa

SEQ ID NO: 181819 - DNA, 15 bp, Homo sapiens
aaactacactttaaa

SEQ ID NO: 181820 - DNA, 15 bp, Homo sapiens
aactacactttaaaa

SEQ ID NO: 181821 - DNA, 15 bp, Homo sapiens
actacactttaaaaa

SEQ ID NO: 181822 - DNA, 15 bp, Homo sapiens
ctacactttaaaaaa

SEQ ID NO: 181823 - DNA, 15 bp, Homo sapiens
tacactttaaaaaaa

SEQ ID NO: 181824 - DNA, 15 bp, Homo sapiens
acactttaaaaaaaa

SEQ ID NO: 181825 - DNA, 15 bp, Homo sapiens
cactttaaaaaaaac

SEQ ID NO: 181826 - DNA, 15 bp, Homo sapiens
actttaaaaaaaact

SEQ ID NO: 181827 - DNA, 15 bp, Homo sapiens
ctttaaaaaaaactc

SEQ ID NO: 181828 - DNA, 15 bp, Homo sapiens
tttaaaaaaaactca

SEQ ID NO: 181829 - DNA, 15 bp, Homo sapiens
ttaaaaaaaactcat

SEQ ID NO: 181830 - DNA, 15 bp, Homo sapiens
taaaaaaaactcatt

SEQ ID NO: 181831 - DNA, 15 bp, Homo sapiens
aaaaaaaactcattg

SEQ ID NO: 181832 - DNA, 15 bp, Homo sapiens
aaaaaaactcattgc

SEQ ID NO: 181833 - DNA, 15 bp, Homo sapiens
aaaaaactcattgct

SEQ ID NO: 181834 - DNA, 15 bp, Homo sapiens
aaaaactcattgctt

SEQ ID NO: 181835 - DNA, 15 bp, Homo sapiens
aaaactcattgcttt

SEQ ID NO: 181836 - DNA, 15 bp, Homo sapiens
aaactcattgctttg

SEQ ID NO: 181837 - DNA, 15 bp, Homo sapiens
aactcattgctttgt

SEQ ID NO: 181838 - DNA, 15 bp, Homo sapiens
actcattgctttgta

SEQ ID NO: 181839 - DNA, 15 bp, Homo sapiens
ctcattgctttgtat

SEQ ID NO: 181840 - DNA, 15 bp, Homo sapiens
tcattgctttgtatt

SEQ ID NO: 181841 - DNA, 15 bp, Homo sapiens
cattgctttgtattg

SEQ ID NO: 181842 - DNA, 15 bp, Homo sapiens
attgctttgtattgt

SEQ ID NO: 181843 - DNA, 15 bp, Homo sapiens
ttgctttgtattgta

SEQ ID NO: 181844 - DNA, 15 bp, Homo sapiens
tgctttgtattgtag

SEQ ID NO: 181845 - DNA, 15 bp, Homo sapiens
gctttgtattgtagt

SEQ ID NO: 181846 - DNA, 15 bp, Homo sapiens
ctttgtattgtagta

SEQ ID NO: 181847 - DNA, 15 bp, Homo sapiens
tttgtattgtagtaa

SEQ ID NO: 181848 - DNA, 15 bp, Homo sapiens
ttgtattgtagtaac

SEQ ID NO: 181849 - DNA, 15 bp, Homo sapiens
tgtattgtagtaacc

SEQ ID NO: 181850 - DNA, 15 bp, Homo sapiens
gtattgtagtaacca

SEQ ID NO: 181851 - DNA, 15 bp, Homo sapiens
tattgtagtaaccaa

SEQ ID NO: 181852 - DNA, 15 bp, Homo sapiens
attgtagtaaccaat

SEQ ID NO: 181853 - DNA, 15 bp, Homo sapiens
ttgtagtaaccaata

SEQ ID NO: 181854 - DNA, 15 bp, Homo sapiens
tgtagtaaccaatat

SEQ ID NO: 181855 - DNA, 15 bp, Homo sapiens
gtagtaaccaatatg

SEQ ID NO: 181856 - DNA, 15 bp, Homo sapiens
tagtaaccaatatgt

SEQ ID NO: 181857 - DNA, 15 bp, Homo sapiens
agtaaccaatatgtg

SEQ ID NO: 181858 - DNA, 15 bp, Homo sapiens
gtaaccaatatgtgc

SEQ ID NO: 181859 - DNA, 15 bp, Homo sapiens
taaccaatatgtgca

SEQ ID NO: 181860 - DNA, 15 bp, Homo sapiens
aaccaatatgtgcag

SEQ ID NO: 181861 - DNA, 15 bp, Homo sapiens
accaatatgtgcagt

SEQ ID NO: 181862 - DNA, 15 bp, Homo sapiens
ccaatatgtgcagta

SEQ ID NO: 181863 - DNA, 15 bp, Homo sapiens
caatatgtgcagtat

SEQ ID NO: 181864 - DNA, 15 bp, Homo sapiens
aatatgtgcagtata

SEQ ID NO: 181865 - DNA, 15 bp, Homo sapiens
atatgtgcagtatac

SEQ ID NO: 181866 - DNA, 15 bp, Homo sapiens
tatgtgcagtatacg

SEQ ID NO: 181867 - DNA, 15 bp, Homo sapiens
atgtgcagtatacgt

SEQ ID NO: 181868 - DNA, 15 bp, Homo sapiens
tgtgcagtatacgtt

SEQ ID NO: 181869 - DNA, 15 bp, Homo sapiens
gtgcagtatacgttg

SEQ ID NO: 181870 - DNA, 15 bp, Homo sapiens
tgcagtatacgttga

SEQ ID NO: 181871 - DNA, 15 bp, Homo sapiens
gcagtatacgttgaa

SEQ ID NO: 181872 - DNA, 15 bp, Homo sapiens
cagtatacgttgaat

SEQ ID NO: 181873 - DNA, 15 bp, Homo sapiens
agtatacgttgaatg

SEQ ID NO: 181874 - DNA, 15 bp, Homo sapiens
gtatacgttgaatgt

SEQ ID NO: 181875 - DNA, 15 bp, Homo sapiens
tatacgttgaatgta

SEQ ID NO: 181876 - DNA, 15 bp, Homo sapiens
atacgttgaatgtat

SEQ ID NO: 181877 - DNA, 15 bp, Homo sapiens
tacgttgaatgtata

SEQ ID NO: 181878 - DNA, 15 bp, Homo sapiens
acgttgaatgtatat

SEQ ID NO: 181879 - DNA, 15 bp, Homo sapiens
cgttgaatgtatatg

SEQ ID NO: 181880 - DNA, 15 bp, Homo sapiens
gttgaatgtatatga

SEQ ID NO: 181881 - DNA, 15 bp, Homo sapiens
ttgaatgtatatgaa

SEQ ID NO: 181882 - DNA, 15 bp, Homo sapiens
tgaatgtatatgaac

SEQ ID NO: 181883 - DNA, 15 bp, Homo sapiens
gaatgtatatgaaca

SEQ ID NO: 181884 - DNA, 15 bp, Homo sapiens
aatgtatatgaacat

SEQ ID NO: 181885 - DNA, 15 bp, Homo sapiens
atgtatatgaacata

SEQ ID NO: 181886 - DNA, 15 bp, Homo sapiens
tgtatatgaacatac

SEQ ID NO: 181887 - DNA, 15 bp, Homo sapiens
gtatatgaacatact

SEQ ID NO: 181888 - DNA, 15 bp, Homo sapiens
tatatgaacatactt

SEQ ID NO: 181889 - DNA, 15 bp, Homo sapiens
atatgaacatacttt

SEQ ID NO: 181890 - DNA, 15 bp, Homo sapiens
tatgaacatactttc

SEQ ID NO: 181891 - DNA, 15 bp, Homo sapiens
atgaacatactttcc

SEQ ID NO: 181892 - DNA, 15 bp, Homo sapiens
tgaacatactttcct

SEQ ID NO: 181893 - DNA, 15 bp, Homo sapiens
gaacatactttccta

SEQ ID NO: 181894 - DNA, 15 bp, Homo sapiens
aacatactttcctat

SEQ ID NO: 181895 - DNA, 15 bp, Homo sapiens
acatactttcctatt

SEQ ID NO: 181896 - DNA, 15 bp, Homo sapiens
catactttcctattt

SEQ ID NO: 181897 - DNA, 15 bp, Homo sapiens
atactttcctatttc

SEQ ID NO: 181898 - DNA, 15 bp, Homo sapiens
tactttcctatttct

SEQ ID NO: 181899 - DNA, 15 bp, Homo sapiens
actttcctatttctg

SEQ ID NO: 181900 - DNA, 15 bp, Homo sapiens
ctttcctatttctgt

SEQ ID NO: 181901 - DNA, 15 bp, Homo sapiens
tttcctatttctgtt

SEQ ID NO: 181902 - DNA, 15 bp, Homo sapiens
ttcctatttctgttc

SEQ ID NO: 181903 - DNA, 15 bp, Homo sapiens
tcctatttctgttct

SEQ ID NO: 181904 - DNA, 15 bp, Homo sapiens
cctatttctgttctt

SEQ ID NO: 181905 - DNA, 15 bp, Homo sapiens
ctatttctgttcttt

SEQ ID NO: 181906 - DNA, 15 bp, Homo sapiens
tatttctgttctttg

SEQ ID NO: 181907 - DNA, 15 bp, Homo sapiens
atttctgttctttga

SEQ ID NO: 181908 - DNA, 15 bp, Homo sapiens
tttctgttctttgaa

SEQ ID NO: 181909 - DNA, 15 bp, Homo sapiens
ttctgttctttgaaa

SEQ ID NO: 181910 - DNA, 15 bp, Homo sapiens
tctgttctttgaaaa

SEQ ID NO: 181911 - DNA, 15 bp, Homo sapiens
ctgttctttgaaaat

SEQ ID NO: 181912 - DNA, 15 bp, Homo sapiens
tgttctttgaaaatg

SEQ ID NO: 181913 - DNA, 15 bp, Homo sapiens
gttctttgaaaatgt

SEQ ID NO: 181914 - DNA, 15 bp, Homo sapiens
ttctttgaaaatgtc

SEQ ID NO: 181915 - DNA, 15 bp, Homo sapiens
tctttgaaaatgtca

SEQ ID NO: 181916 - DNA, 15 bp, Homo sapiens
ctttgaaaatgtcag

SEQ ID NO: 181917 - DNA, 15 bp, Homo sapiens
tttgaaaatgtcaga

SEQ ID NO: 181918 - DNA, 15 bp, Homo sapiens
ttgaaaatgtcagaa

SEQ ID NO: 181919 - DNA, 15 bp, Homo sapiens
tgaaaatgtcagaaa

SEQ ID NO: 181920 - DNA, 15 bp, Homo sapiens
gaaaatgtcagaaat

SEQ ID NO: 181921 - DNA, 15 bp, Homo sapiens
aaaatgtcagaaata

SEQ ID NO: 181922 - DNA, 15 bp, Homo sapiens
aaatgtcagaaatat

SEQ ID NO: 181923 - DNA, 15 bp, Homo sapiens
aatgtcagaaatatt

SEQ ID NO: 181924 - DNA, 15 bp, Homo sapiens
atgtcagaaatattt

SEQ ID NO: 181925 - DNA, 15 bp, Homo sapiens
tgtcagaaatatttt

SEQ ID NO: 181926 - DNA, 15 bp, Homo sapiens
gtcagaaatattttt

SEQ ID NO: 181927 - DNA, 15 bp, Homo sapiens
tcagaaatatttttt

SEQ ID NO: 181928 - DNA, 15 bp, Homo sapiens
cagaaatattttttt

SEQ ID NO: 181929 - DNA, 15 bp, Homo sapiens
agaaatatttttttc

SEQ ID NO: 181930 - DNA, 15 bp, Homo sapiens
gaaatatttttttct

SEQ ID NO: 181931 - DNA, 15 bp, Homo sapiens
aaatatttttttctt

SEQ ID NO: 181932 - DNA, 15 bp, Homo sapiens
aatatttttttcttt

SEQ ID NO: 181933 - DNA, 15 bp, Homo sapiens
atatttttttctttc

SEQ ID NO: 181934 - DNA, 15 bp, Homo sapiens
tatttttttctttct

SEQ ID NO: 181935 - DNA, 15 bp, Homo sapiens
atttttttctttctc

SEQ ID NO: 181936 - DNA, 15 bp, Homo sapiens
tttttttctttctca

SEQ ID NO: 181937 - DNA, 15 bp, Homo sapiens
ttttttctttctcat

SEQ ID NO: 181938 - DNA, 15 bp, Homo sapiens
tttttctttctcatt

SEQ ID NO: 181939 - DNA, 15 bp, Homo sapiens
ttttctttctcattt

SEQ ID NO: 181940 - DNA, 15 bp, Homo sapiens
tttctttctcatttt

SEQ ID NO: 181941 - DNA, 15 bp, Homo sapiens
ttctttctcatttta

SEQ ID NO: 181942 - DNA, 15 bp, Homo sapiens
tctttctcattttat

SEQ ID NO: 181943 - DNA, 15 bp, Homo sapiens
ctttctcattttatg

SEQ ID NO: 181944 - DNA, 15 bp, Homo sapiens
tttctcattttatgt

SEQ ID NO: 181945 - DNA, 15 bp, Homo sapiens
ttctcattttatgtt

SEQ ID NO: 181946 - DNA, 15 bp, Homo sapiens
tctcattttatgttg

SEQ ID NO: 181947 - DNA, 15 bp, Homo sapiens
ctcattttatgttga

SEQ ID NO: 181948 - DNA, 15 bp, Homo sapiens
tcattttatgttgaa

SEQ ID NO: 181949 - DNA, 15 bp, Homo sapiens
cattttatgttgaac

SEQ ID NO: 181950 - DNA, 15 bp, Homo sapiens
attttatgttgaact

SEQ ID NO: 181951 - DNA, 15 bp, Homo sapiens
ttttatgttgaacta

SEQ ID NO: 181952 - DNA, 15 bp, Homo sapiens
tttatgttgaactaa

SEQ ID NO: 181953 - DNA, 15 bp, Homo sapiens
ttatgttgaactaaa

SEQ ID NO: 181954 - DNA, 15 bp, Homo sapiens
tatgttgaactaaaa

SEQ ID NO: 181955 - DNA, 15 bp, Homo sapiens
atgttgaactaaaaa

SEQ ID NO: 181956 - DNA, 15 bp, Homo sapiens
tgttgaactaaaaag

SEQ ID NO: 181957 - DNA, 15 bp, Homo sapiens
gttgaactaaaaagg

SEQ ID NO: 181958 - DNA, 15 bp, Homo sapiens
ttgaactaaaaagga

SEQ ID NO: 181959 - DNA, 15 bp, Homo sapiens
tgaactaaaaaggat

SEQ ID NO: 181960 - DNA, 15 bp, Homo sapiens
gaactaaaaaggatt

SEQ ID NO: 181961 - DNA, 15 bp, Homo sapiens
aactaaaaaggatta

SEQ ID NO: 181962 - DNA, 15 bp, Homo sapiens
actaaaaaggattaa

SEQ ID NO: 181963 - DNA, 15 bp, Homo sapiens
ctaaaaaggattaaa

SEQ ID NO: 181964 - DNA, 15 bp, Homo sapiens
taaaaaggattaaaa

SEQ ID NO: 181965 - DNA, 15 bp, Homo sapiens
aaaaaggattaaaaa

SEQ ID NO: 181966 - DNA, 15 bp, Homo sapiens
aaaaggattaaaaaa

SEQ ID NO: 181967 - DNA, 15 bp, Homo sapiens
aaaggattaaaaaaa

SEQ ID NO: 181968 - DNA, 15 bp, Homo sapiens
aaggattaaaaaaaa

SEQ ID NO: 181969 - DNA, 15 bp, Homo sapiens
aggattaaaaaaaaa

SEQ ID NO: 181970 - DNA, 15 bp, Homo sapiens
ggattaaaaaaaaaa

SEQ ID NO: 181971 - DNA, 15 bp, Homo sapiens
gattaaaaaaaaaat

SEQ ID NO: 181972 - DNA, 15 bp, Homo sapiens
attaaaaaaaaaatc

SEQ ID NO: 181973 - DNA, 15 bp, Homo sapiens
ttaaaaaaaaaatct

SEQ ID NO: 181974 - DNA, 15 bp, Homo sapiens
taaaaaaaaaatctc

SEQ ID NO: 181975 - DNA, 15 bp, Homo sapiens
aaaaaaaaaatctcc

SEQ ID NO: 181976 - DNA, 15 bp, Homo sapiens
aaaaaaaaatctcca

SEQ ID NO: 181977 - DNA, 15 bp, Homo sapiens
aaaaaaaatctccag

SEQ ID NO: 181978 - DNA, 15 bp, Homo sapiens
aaaaaaatctccaga

SEQ ID NO: 181979 - DNA, 15 bp, Homo sapiens
aaaaaatctccagac

SEQ ID NO: 181980 - DNA, 15 bp, Homo sapiens
aaaaatctccagact

SEQ ID NO: 181981 - DNA, 15 bp, Homo sapiens
aaaatctccagactc

SEQ ID NO: 181982 - DNA, 15 bp, Homo sapiens
aaatctccagactca

SEQ ID NO: 181983 - DNA, 15 bp, Homo sapiens
aatctccagactcaa

SEQ ID NO: 181984 - DNA, 15 bp, Homo sapiens
atctccagactcaag

SEQ ID NO: 181985 - DNA, 15 bp, Homo sapiens
tctccagactcaagt

SEQ ID NO: 181986 - DNA, 15 bp, Homo sapiens
ctccagactcaagtt

SEQ ID NO: 181987 - DNA, 15 bp, Homo sapiens
tccagactcaagttg

SEQ ID NO: 181988 - DNA, 15 bp, Homo sapiens
ccagactcaagttgc

SEQ ID NO: 181989 - DNA, 15 bp, Homo sapiens
cagactcaagttgct

SEQ ID NO: 181990 - DNA, 15 bp, Homo sapiens
agactcaagttgcta

SEQ ID NO: 181991 - DNA, 15 bp, Homo sapiens
gactcaagttgctaa

SEQ ID NO: 181992 - DNA, 15 bp, Homo sapiens
actcaagttgctaag

SEQ ID NO: 181993 - DNA, 15 bp, Homo sapiens
ctcaagttgctaaga

SEQ ID NO: 181994 - DNA, 15 bp, Homo sapiens
tcaagttgctaagac

SEQ ID NO: 181995 - DNA, 15 bp, Homo sapiens
caagttgctaagacc

SEQ ID NO: 181996 - DNA, 15 bp, Homo sapiens
aagttgctaagacct

SEQ ID NO: 181997 - DNA, 15 bp, Homo sapiens
agttgctaagacctt

SEQ ID NO: 181998 - DNA, 15 bp, Homo sapiens
gttgctaagaccttt

SEQ ID NO: 181999 - DNA, 15 bp, Homo sapiens
ttgctaagacctttt

SEQ ID NO: 182000 - DNA, 15 bp, Homo sapiens
tgctaagaccttttg

SEQ ID NO: 182001 - DNA, 15 bp, Homo sapiens
gctaagaccttttgt

SEQ ID NO: 182002 - DNA, 15 bp, Homo sapiens
ctaagaccttttgtc

SEQ ID NO: 182003 - DNA, 15 bp, Homo sapiens
taagaccttttgtcc

SEQ ID NO: 182004 - DNA, 15 bp, Homo sapiens
aagaccttttgtcct

SEQ ID NO: 182005 - DNA, 15 bp, Homo sapiens
agaccttttgtcctg

SEQ ID NO: 182006 - DNA, 15 bp, Homo sapiens
gaccttttgtcctgc

SEQ ID NO: 182007 - DNA, 15 bp, Homo sapiens
accttttgtcctgcc

SEQ ID NO: 182008 - DNA, 15 bp, Homo sapiens
ccttttgtcctgcct

SEQ ID NO: 182009 - DNA, 15 bp, Homo sapiens
cttttgtcctgcctt

SEQ ID NO: 182010 - DNA, 15 bp, Homo sapiens
ttttgtcctgccttt

SEQ ID NO: 182011 - DNA, 15 bp, Homo sapiens
tttgtcctgcctttt

SEQ ID NO: 182012 - DNA, 15 bp, Homo sapiens
ttgtcctgccttttg

SEQ ID NO: 182013 - DNA, 15 bp, Homo sapiens
tgtcctgccttttgt

SEQ ID NO: 182014 - DNA, 15 bp, Homo sapiens
gtcctgccttttgtc

SEQ ID NO: 182015 - DNA, 15 bp, Homo sapiens
tcctgccttttgtcc

SEQ ID NO: 182016 - DNA, 15 bp, Homo sapiens
cctgccttttgtcct

SEQ ID NO: 182017 - DNA, 15 bp, Homo sapiens
ctgccttttgtcctt

SEQ ID NO: 182018 - DNA, 15 bp, Homo sapiens
tgccttttgtccttc

SEQ ID NO: 182019 - DNA, 15 bp, Homo sapiens
gccttttgtccttcc

SEQ ID NO: 182020 - DNA, 15 bp, Homo sapiens
ccttttgtccttcct

SEQ ID NO: 182021 - DNA, 15 bp, Homo sapiens
cttttgtccttcctt

SEQ ID NO: 182022 - DNA, 15 bp, Homo sapiens
ttttgtccttccttt

SEQ ID NO: 182023 - DNA, 15 bp, Homo sapiens
tttgtccttcctttt

SEQ ID NO: 182024 - DNA, 15 bp, Homo sapiens
ttgtccttccttttg

SEQ ID NO: 182025 - DNA, 15 bp, Homo sapiens
tgtccttccttttgt

SEQ ID NO: 182026 - DNA, 15 bp, Homo sapiens
gtccttccttttgtg

SEQ ID NO: 182027 - DNA, 15 bp, Homo sapiens
tccttccttttgtga

SEQ ID NO: 182028 - DNA, 15 bp, Homo sapiens
ccttccttttgtgag

SEQ ID NO: 182029 - DNA, 15 bp, Homo sapiens
cttccttttgtgagg

SEQ ID NO: 182030 - DNA, 15 bp, Homo sapiens
ttccttttgtgaggc

SEQ ID NO: 182031 - DNA, 15 bp, Homo sapiens
tccttttgtgaggca

SEQ ID NO: 182032 - DNA, 15 bp, Homo sapiens
ccttttgtgaggcac

SEQ ID NO: 182033 - DNA, 15 bp, Homo sapiens
cttttgtgaggcact

SEQ ID NO: 182034 - DNA, 15 bp, Homo sapiens
ttttgtgaggcactt

SEQ ID NO: 182035 - DNA, 15 bp, Homo sapiens
tttgtgaggcactta

SEQ ID NO: 182036 - DNA, 15 bp, Homo sapiens
ttgtgaggcacttac

SEQ ID NO: 182037 - DNA, 15 bp, Homo sapiens
tgtgaggcacttact

SEQ ID NO: 182038 - DNA, 15 bp, Homo sapiens
gtgaggcacttactt

SEQ ID NO: 182039 - DNA, 15 bp, Homo sapiens
tgaggcacttactta

SEQ ID NO: 182040 - DNA, 15 bp, Homo sapiens
gaggcacttacttac

SEQ ID NO: 182041 - DNA, 15 bp, Homo sapiens
aggcacttacttaca

SEQ ID NO: 182042 - DNA, 15 bp, Homo sapiens
ggcacttacttacaa

SEQ ID NO: 182043 - DNA, 15 bp, Homo sapiens
gcacttacttacaac

SEQ ID NO: 182044 - DNA, 15 bp, Homo sapiens
cacttacttacaact

SEQ ID NO: 182045 - DNA, 15 bp, Homo sapiens
acttacttacaactt

SEQ ID NO: 182046 - DNA, 15 bp, Homo sapiens
cttacttacaacttg

SEQ ID NO: 182047 - DNA, 15 bp, Homo sapiens
ttacttacaacttgg

SEQ ID NO: 182048 - DNA, 15 bp, Homo sapiens
tacttacaacttggt

SEQ ID NO: 182049 - DNA, 15 bp, Homo sapiens
acttacaacttggtt

SEQ ID NO: 182050 - DNA, 15 bp, Homo sapiens
cttacaacttggtta

SEQ ID NO: 182051 - DNA, 15 bp, Homo sapiens
ttacaacttggttac

SEQ ID NO: 182052 - DNA, 15 bp, Homo sapiens
tacaacttggttact

SEQ ID NO: 182053 - DNA, 15 bp, Homo sapiens
acaacttggttactt

SEQ ID NO: 182054 - DNA, 15 bp, Homo sapiens
caacttggttactta

SEQ ID NO: 182055 - DNA, 15 bp, Homo sapiens
aacttggttacttag

SEQ ID NO: 182056 - DNA, 15 bp, Homo sapiens
acttggttacttagt

SEQ ID NO: 182057 - DNA, 15 bp, Homo sapiens
cttggttacttagtt

SEQ ID NO: 182058 - DNA, 15 bp, Homo sapiens
ttggttacttagttg

SEQ ID NO: 182059 - DNA, 15 bp, Homo sapiens
tggttacttagttgg

SEQ ID NO: 182060 - DNA, 15 bp, Homo sapiens
ggttacttagttgga

SEQ ID NO: 182061 - DNA, 15 bp, Homo sapiens
gttacttagttggac

SEQ ID NO: 182062 - DNA, 15 bp, Homo sapiens
ttacttagttggaca

SEQ ID NO: 182063 - DNA, 15 bp, Homo sapiens
tacttagttggacag

SEQ ID NO: 182064 - DNA, 15 bp, Homo sapiens
acttagttggacagc

SEQ ID NO: 182065 - DNA, 15 bp, Homo sapiens
cttagttggacagca

SEQ ID NO: 182066 - DNA, 15 bp, Homo sapiens
ttagttggacagcag

SEQ ID NO: 182067 - DNA, 15 bp, Homo sapiens
tagttggacagcagg

SEQ ID NO: 182068 - DNA, 15 bp, Homo sapiens
agttggacagcagga

SEQ ID NO: 182069 - DNA, 15 bp, Homo sapiens
gttggacagcaggaa

SEQ ID NO: 182070 - DNA, 15 bp, Homo sapiens
ttggacagcaggaag

SEQ ID NO: 182071 - DNA, 15 bp, Homo sapiens
tggacagcaggaagt

SEQ ID NO: 182072 - DNA, 15 bp, Homo sapiens
ggacagcaggaagtt

SEQ ID NO: 182073 - DNA, 15 bp, Homo sapiens
gacagcaggaagttg

SEQ ID NO: 182074 - DNA, 15 bp, Homo sapiens
acagcaggaagttgt

SEQ ID NO: 182075 - DNA, 15 bp, Homo sapiens
cagcaggaagttgtg

SEQ ID NO: 182076 - DNA, 15 bp, Homo sapiens
agcaggaagttgtgt

SEQ ID NO: 182077 - DNA, 15 bp, Homo sapiens
gcaggaagttgtgta

SEQ ID NO: 182078 - DNA, 15 bp, Homo sapiens
caggaagttgtgtag

SEQ ID NO: 182079 - DNA, 15 bp, Homo sapiens
aggaagttgtgtaga

SEQ ID NO: 182080 - DNA, 15 bp, Homo sapiens
ggaagttgtgtagat

SEQ ID NO: 182081 - DNA, 15 bp, Homo sapiens
gaagttgtgtagata

SEQ ID NO: 182082 - DNA, 15 bp, Homo sapiens
aagttgtgtagatag

SEQ ID NO: 182083 - DNA, 15 bp, Homo sapiens
agttgtgtagatagg

SEQ ID NO: 182084 - DNA, 15 bp, Homo sapiens
gttgtgtagatagga

SEQ ID NO: 182085 - DNA, 15 bp, Homo sapiens
ttgtgtagataggag

SEQ ID NO: 182086 - DNA, 15 bp, Homo sapiens
tgtgtagataggagc

SEQ ID NO: 182087 - DNA, 15 bp, Homo sapiens
gtgtagataggagcc

SEQ ID NO: 182088 - DNA, 15 bp, Homo sapiens
tgtagataggagcct

SEQ ID NO: 182089 - DNA, 15 bp, Homo sapiens
gtagataggagcctg

SEQ ID NO: 182090 - DNA, 15 bp, Homo sapiens
tagataggagcctga

SEQ ID NO: 182091 - DNA, 15 bp, Homo sapiens
agataggagcctgat

SEQ ID NO: 182092 - DNA, 15 bp, Homo sapiens
gataggagcctgatt

SEQ ID NO: 182093 - DNA, 15 bp, Homo sapiens
ataggagcctgattg

SEQ ID NO: 182094 - DNA, 15 bp, Homo sapiens
taggagcctgattgt

SEQ ID NO: 182095 - DNA, 15 bp, Homo sapiens
aggagcctgattgtg

SEQ ID NO: 182096 - DNA, 15 bp, Homo sapiens
ggagcctgattgtgt

SEQ ID NO: 182097 - DNA, 15 bp, Homo sapiens
gagcctgattgtgtt

SEQ ID NO: 182098 - DNA, 15 bp, Homo sapiens
agcctgattgtgttc

SEQ ID NO: 182099 - DNA, 15 bp, Homo sapiens
gcctgattgtgttct

SEQ ID NO: 182100 - DNA, 15 bp, Homo sapiens
cctgattgtgttctt

SEQ ID NO: 182101 - DNA, 15 bp, Homo sapiens
ctgattgtgttctta

SEQ ID NO: 182102 - DNA, 15 bp, Homo sapiens
tgattgtgttcttag

SEQ ID NO: 182103 - DNA, 15 bp, Homo sapiens
gattgtgttcttagg

SEQ ID NO: 182104 - DNA, 15 bp, Homo sapiens
attgtgttcttaggc

SEQ ID NO: 182105 - DNA, 15 bp, Homo sapiens
ttgtgttcttaggct

SEQ ID NO: 182106 - DNA, 15 bp, Homo sapiens
tgtgttcttaggctg

SEQ ID NO: 182107 - DNA, 15 bp, Homo sapiens
gtgttcttaggctga

SEQ ID NO: 182108 - DNA, 15 bp, Homo sapiens
tgttcttaggctgat

SEQ ID NO: 182109 - DNA, 15 bp, Homo sapiens
gttcttaggctgata

SEQ ID NO: 182110 - DNA, 15 bp, Homo sapiens
ttcttaggctgatag

SEQ ID NO: 182111 - DNA, 15 bp, Homo sapiens
tcttaggctgataga

SEQ ID NO: 182112 - DNA, 15 bp, Homo sapiens
cttaggctgatagat

SEQ ID NO: 182113 - DNA, 15 bp, Homo sapiens
ttaggctgatagatt

SEQ ID NO: 182114 - DNA, 15 bp, Homo sapiens
taggctgatagatta

SEQ ID NO: 182115 - DNA, 15 bp, Homo sapiens
aggctgatagattat

SEQ ID NO: 182116 - DNA, 15 bp, Homo sapiens
ggctgatagattatt

SEQ ID NO: 182117 - DNA, 15 bp, Homo sapiens
gctgatagattattt

SEQ ID NO: 182118 - DNA, 15 bp, Homo sapiens
ctgatagattatttg

SEQ ID NO: 182119 - DNA, 15 bp, Homo sapiens
tgatagattatttgc

SEQ ID NO: 182120 - DNA, 15 bp, Homo sapiens
gatagattatttgcc

SEQ ID NO: 182121 - DNA, 15 bp, Homo sapiens
atagattatttgcct

SEQ ID NO: 182122 - DNA, 15 bp, Homo sapiens
tagattatttgcctg

SEQ ID NO: 182123 - DNA, 15 bp, Homo sapiens
agattatttgcctgt

SEQ ID NO: 182124 - DNA, 15 bp, Homo sapiens
gattatttgcctgtg

SEQ ID NO: 182125 - DNA, 15 bp, Homo sapiens
attatttgcctgtgg

SEQ ID NO: 182126 - DNA, 15 bp, Homo sapiens
ttatttgcctgtggt

SEQ ID NO: 182127 - DNA, 15 bp, Homo sapiens
tatttgcctgtggtt

SEQ ID NO: 182128 - DNA, 15 bp, Homo sapiens
atttgcctgtggttt

SEQ ID NO: 182129 - DNA, 15 bp, Homo sapiens
tttgcctgtggtttg

SEQ ID NO: 182130 - DNA, 15 bp, Homo sapiens
ttgcctgtggtttgg

SEQ ID NO: 182131 - DNA, 15 bp, Homo sapiens
tgcctgtggtttgga

SEQ ID NO: 182132 - DNA, 15 bp, Homo sapiens
gcctgtggtttggag

SEQ ID NO: 182133 - DNA, 15 bp, Homo sapiens
cctgtggtttggagt

SEQ ID NO: 182134 - DNA, 15 bp, Homo sapiens
ctgtggtttggagtc

SEQ ID NO: 182135 - DNA, 15 bp, Homo sapiens
tgtggtttggagtct

SEQ ID NO: 182136 - DNA, 15 bp, Homo sapiens
gtggtttggagtcta

SEQ ID NO: 182137 - DNA, 15 bp, Homo sapiens
tggtttggagtctag

SEQ ID NO: 182138 - DNA, 15 bp, Homo sapiens
ggtttggagtctagt

SEQ ID NO: 182139 - DNA, 15 bp, Homo sapiens
gtttggagtctagtt

SEQ ID NO: 182140 - DNA, 15 bp, Homo sapiens
tttggagtctagttg

SEQ ID NO: 182141 - DNA, 15 bp, Homo sapiens
ttggagtctagttgg

SEQ ID NO: 182142 - DNA, 15 bp, Homo sapiens
tggagtctagttgga

SEQ ID NO: 182143 - DNA, 15 bp, Homo sapiens
ggagtctagttggaa

SEQ ID NO: 182144 - DNA, 15 bp, Homo sapiens
gagtctagttggaag

SEQ ID NO: 182145 - DNA, 15 bp, Homo sapiens
agtctagttggaaga

SEQ ID NO: 182146 - DNA, 15 bp, Homo sapiens
gtctagttggaagaa

SEQ ID NO: 182147 - DNA, 15 bp, Homo sapiens
tctagttggaagaag

SEQ ID NO: 182148 - DNA, 15 bp, Homo sapiens
ctagttggaagaagc

SEQ ID NO: 182149 - DNA, 15 bp, Homo sapiens
tagttggaagaagcc

SEQ ID NO: 182150 - DNA, 15 bp, Homo sapiens
agttggaagaagcct

SEQ ID NO: 182151 - DNA, 15 bp, Homo sapiens
gttggaagaagcctc

SEQ ID NO: 182152 - DNA, 15 bp, Homo sapiens
ttggaagaagcctca

SEQ ID NO: 182153 - DNA, 15 bp, Homo sapiens
tggaagaagcctcag

SEQ ID NO: 182154 - DNA, 15 bp, Homo sapiens
ggaagaagcctcagg

SEQ ID NO: 182155 - DNA, 15 bp, Homo sapiens
gaagaagcctcaggt

SEQ ID NO: 182156 - DNA, 15 bp, Homo sapiens
aagaagcctcaggta

SEQ ID NO: 182157 - DNA, 15 bp, Homo sapiens
agaagcctcaggtag

SEQ ID NO: 182158 - DNA, 15 bp, Homo sapiens
gaagcctcaggtagg

SEQ ID NO: 182159 - DNA, 15 bp, Homo sapiens
aagcctcaggtaggt

SEQ ID NO: 182160 - DNA, 15 bp, Homo sapiens
agcctcaggtaggtg

SEQ ID NO: 182161 - DNA, 15 bp, Homo sapiens
gcctcaggtaggtgg

SEQ ID NO: 182162 - DNA, 15 bp, Homo sapiens
cctcaggtaggtggg

SEQ ID NO: 182163 - DNA, 15 bp, Homo sapiens
ctcaggtaggtggga

SEQ ID NO: 182164 - DNA, 15 bp, Homo sapiens
tcaggtaggtgggag

SEQ ID NO: 182165 - DNA, 15 bp, Homo sapiens
caggtaggtgggagc

SEQ ID NO: 182166 - DNA, 15 bp, Homo sapiens
aggtaggtgggagct

SEQ ID NO: 182167 - DNA, 15 bp, Homo sapiens
ggtaggtgggagctg

SEQ ID NO: 182168 - DNA, 15 bp, Homo sapiens
gtaggtgggagctgg

SEQ ID NO: 182169 - DNA, 15 bp, Homo sapiens
taggtgggagctgga

SEQ ID NO: 182170 - DNA, 15 bp, Homo sapiens
aggtgggagctggag

SEQ ID NO: 182171 - DNA, 15 bp, Homo sapiens
ggtgggagctggagc

SEQ ID NO: 182172 - DNA, 15 bp, Homo sapiens
gtgggagctggagca

SEQ ID NO: 182173 - DNA, 15 bp, Homo sapiens
tgggagctggagcag

SEQ ID NO: 182174 - DNA, 15 bp, Homo sapiens
gggagctggagcagt

SEQ ID NO: 182175 - DNA, 15 bp, Homo sapiens
ggagctggagcagtg

SEQ ID NO: 182176 - DNA, 15 bp, Homo sapiens
gagctggagcagtgg

SEQ ID NO: 182177 - DNA, 15 bp, Homo sapiens
agctggagcagtgga

SEQ ID NO: 182178 - DNA, 15 bp, Homo sapiens
gctggagcagtggag

SEQ ID NO: 182179 - DNA, 15 bp, Homo sapiens
ctggagcagtggagg

SEQ ID NO: 182180 - DNA, 15 bp, Homo sapiens
tggagcagtggaggc

SEQ ID NO: 182181 - DNA, 15 bp, Homo sapiens
ggagcagtggaggct

SEQ ID NO: 182182 - DNA, 15 bp, Homo sapiens
gagcagtggaggctg

SEQ ID NO: 182183 - DNA, 15 bp, Homo sapiens
agcagtggaggctgg

SEQ ID NO: 182184 - DNA, 15 bp, Homo sapiens
gcagtggaggctgga

SEQ ID NO: 182185 - DNA, 15 bp, Homo sapiens
cagtggaggctggag

SEQ ID NO: 182186 - DNA, 15 bp, Homo sapiens
agtggaggctggaga

SEQ ID NO: 182187 - DNA, 15 bp, Homo sapiens
gtggaggctggagag

SEQ ID NO: 182188 - DNA, 15 bp, Homo sapiens
tggaggctggagagg

SEQ ID NO: 182189 - DNA, 15 bp, Homo sapiens
ggaggctggagaggt

SEQ ID NO: 182190 - DNA, 15 bp, Homo sapiens
gaggctggagaggtc

SEQ ID NO: 182191 - DNA, 15 bp, Homo sapiens
aggctggagaggtct

SEQ ID NO: 182192 - DNA, 15 bp, Homo sapiens
ggctggagaggtctc

SEQ ID NO: 182193 - DNA, 15 bp, Homo sapiens
gctggagaggtctcc

SEQ ID NO: 182194 - DNA, 15 bp, Homo sapiens
ctggagaggtctccc

SEQ ID NO: 182195 - DNA, 15 bp, Homo sapiens
tggagaggtctccca

SEQ ID NO: 182196 - DNA, 15 bp, Homo sapiens
ggagaggtctcccag

SEQ ID NO: 182197 - DNA, 15 bp, Homo sapiens
gagaggtctcccagg

SEQ ID NO: 182198 - DNA, 15 bp, Homo sapiens
agaggtctcccaggc

SEQ ID NO: 182199 - DNA, 15 bp, Homo sapiens
gaggtctcccaggct

SEQ ID NO: 182200 - DNA, 15 bp, Homo sapiens
aggtctcccaggcta

SEQ ID NO: 182201 - DNA, 15 bp, Homo sapiens
ggtctcccaggctaa

SEQ ID NO: 182202 - DNA, 15 bp, Homo sapiens
gtctcccaggctaag

SEQ ID NO: 182203 - DNA, 15 bp, Homo sapiens
tctcccaggctaagg

SEQ ID NO: 182204 - DNA, 15 bp, Homo sapiens
ctcccaggctaaggg

SEQ ID NO: 182205 - DNA, 15 bp, Homo sapiens
tcccaggctaagggt

SEQ ID NO: 182206 - DNA, 15 bp, Homo sapiens
cccaggctaagggtg

SEQ ID NO: 182207 - DNA, 15 bp, Homo sapiens
ccaggctaagggtgg

SEQ ID NO: 182208 - DNA, 15 bp, Homo sapiens
caggctaagggtggg

SEQ ID NO: 182209 - DNA, 15 bp, Homo sapiens
aggctaagggtgggg

SEQ ID NO: 182210 - DNA, 15 bp, Homo sapiens
ggctaagggtggggc

SEQ ID NO: 182211 - DNA, 15 bp, Homo sapiens
gctaagggtggggct

SEQ ID NO: 182212 - DNA, 15 bp, Homo sapiens
ctaagggtggggctt

SEQ ID NO: 182213 - DNA, 15 bp, Homo sapiens
taagggtggggcttt

SEQ ID NO: 182214 - DNA, 15 bp, Homo sapiens
aagggtggggctttg

SEQ ID NO: 182215 - DNA, 15 bp, Homo sapiens
agggtggggctttga

SEQ ID NO: 182216 - DNA, 15 bp, Homo sapiens
gggtggggctttgag

SEQ ID NO: 182217 - DNA, 15 bp, Homo sapiens
ggtggggctttgagt

SEQ ID NO: 182218 - DNA, 15 bp, Homo sapiens
gtggggctttgagtg

SEQ ID NO: 182219 - DNA, 15 bp, Homo sapiens
tggggctttgagtga

SEQ ID NO: 182220 - DNA, 15 bp, Homo sapiens
ggggctttgagtgac

SEQ ID NO: 182221 - DNA, 15 bp, Homo sapiens
gggctttgagtgact

SEQ ID NO: 182222 - DNA, 15 bp, Homo sapiens
ggctttgagtgactt

SEQ ID NO: 182223 - DNA, 15 bp, Homo sapiens
gctttgagtgactta

SEQ ID NO: 182224 - DNA, 15 bp, Homo sapiens
ctttgagtgacttaa

SEQ ID NO: 182225 - DNA, 15 bp, Homo sapiens
tttgagtgacttaag

SEQ ID NO: 182226 - DNA, 15 bp, Homo sapiens
ttgagtgacttaaga

SEQ ID NO: 182227 - DNA, 15 bp, Homo sapiens
tgagtgacttaagaa

SEQ ID NO: 182228 - DNA, 15 bp, Homo sapiens
gagtgacttaagaaa

SEQ ID NO: 182229 - DNA, 15 bp, Homo sapiens
agtgacttaagaaac

SEQ ID NO: 182230 - DNA, 15 bp, Homo sapiens
gtgacttaagaaact

SEQ ID NO: 182231 - DNA, 15 bp, Homo sapiens
tgacttaagaaactc

SEQ ID NO: 182232 - DNA, 15 bp, Homo sapiens
gacttaagaaactcg

SEQ ID NO: 182233 - DNA, 15 bp, Homo sapiens
acttaagaaactcgc

SEQ ID NO: 182234 - DNA, 15 bp, Homo sapiens
cttaagaaactcgca

SEQ ID NO: 182235 - DNA, 15 bp, Homo sapiens
ttaagaaactcgcat

SEQ ID NO: 182236 - DNA, 15 bp, Homo sapiens
taagaaactcgcatt

SEQ ID NO: 182237 - DNA, 15 bp, Homo sapiens
aagaaactcgcattc

SEQ ID NO: 182238 - DNA, 15 bp, Homo sapiens
agaaactcgcattct

SEQ ID NO: 182239 - DNA, 15 bp, Homo sapiens
gaaactcgcattctc

SEQ ID NO: 182240 - DNA, 15 bp, Homo sapiens
aaactcgcattctct

SEQ ID NO: 182241 - DNA, 15 bp, Homo sapiens
aactcgcattctcta

SEQ ID NO: 182242 - DNA, 15 bp, Homo sapiens
actcgcattctctag

SEQ ID NO: 182243 - DNA, 15 bp, Homo sapiens
ctcgcattctctaga

SEQ ID NO: 182244 - DNA, 15 bp, Homo sapiens
tcgcattctctagaa

SEQ ID NO: 182245 - DNA, 15 bp, Homo sapiens
cgcattctctagaag

SEQ ID NO: 182246 - DNA, 15 bp, Homo sapiens
gcattctctagaagc

SEQ ID NO: 182247 - DNA, 15 bp, Homo sapiens
cattctctagaagcc

SEQ ID NO: 182248 - DNA, 15 bp, Homo sapiens
attctctagaagcct

SEQ ID NO: 182249 - DNA, 15 bp, Homo sapiens
ttctctagaagcctg

SEQ ID NO: 182250 - DNA, 15 bp, Homo sapiens
tctctagaagcctga

SEQ ID NO: 182251 - DNA, 15 bp, Homo sapiens
ctctagaagcctgaa

SEQ ID NO: 182252 - DNA, 15 bp, Homo sapiens
tctagaagcctgaac

SEQ ID NO: 182253 - DNA, 15 bp, Homo sapiens
ctagaagcctgaact

SEQ ID NO: 182254 - DNA, 15 bp, Homo sapiens
tagaagcctgaactc

SEQ ID NO: 182255 - DNA, 15 bp, Homo sapiens
agaagcctgaactct

SEQ ID NO: 182256 - DNA, 15 bp, Homo sapiens
gaagcctgaactctg

SEQ ID NO: 182257 - DNA, 15 bp, Homo sapiens
aagcctgaactctgc

SEQ ID NO: 182258 - DNA, 15 bp, Homo sapiens
agcctgaactctgct

SEQ ID NO: 182259 - DNA, 15 bp, Homo sapiens
gcctgaactctgctt

SEQ ID NO: 182260 - DNA, 15 bp, Homo sapiens
cctgaactctgcttc

SEQ ID NO: 182261 - DNA, 15 bp, Homo sapiens
ctgaactctgcttca

SEQ ID NO: 182262 - DNA, 15 bp, Homo sapiens
tgaactctgcttcac

SEQ ID NO: 182263 - DNA, 15 bp, Homo sapiens
gaactctgcttcaca

SEQ ID NO: 182264 - DNA, 15 bp, Homo sapiens
aactctgcttcacac

SEQ ID NO: 182265 - DNA, 15 bp, Homo sapiens
actctgcttcacact

SEQ ID NO: 182266 - DNA, 15 bp, Homo sapiens
ctctgcttcacactg

SEQ ID NO: 182267 - DNA, 15 bp, Homo sapiens
tctgcttcacactgt

SEQ ID NO: 182268 - DNA, 15 bp, Homo sapiens
ctgcttcacactgtg

SEQ ID NO: 182269 - DNA, 15 bp, Homo sapiens
tgcttcacactgtgt

SEQ ID NO: 182270 - DNA, 15 bp, Homo sapiens
gcttcacactgtgtc

SEQ ID NO: 182271 - DNA, 15 bp, Homo sapiens
cttcacactgtgtcc

SEQ ID NO: 182272 - DNA, 15 bp, Homo sapiens
ttcacactgtgtccc

SEQ ID NO: 182273 - DNA, 15 bp, Homo sapiens
tcacactgtgtccct

SEQ ID NO: 182274 - DNA, 15 bp, Homo sapiens
cacactgtgtccctg

SEQ ID NO: 182275 - DNA, 15 bp, Homo sapiens
acactgtgtccctgg

SEQ ID NO: 182276 - DNA, 15 bp, Homo sapiens
cactgtgtccctggg

SEQ ID NO: 182277 - DNA, 15 bp, Homo sapiens
actgtgtccctgggc

SEQ ID NO: 182278 - DNA, 15 bp, Homo sapiens
ctgtgtccctgggca

SEQ ID NO: 182279 - DNA, 15 bp, Homo sapiens
tgtgtccctgggcac

SEQ ID NO: 182280 - DNA, 15 bp, Homo sapiens
gtgtccctgggcacc

SEQ ID NO: 182281 - DNA, 15 bp, Homo sapiens
tgtccctgggcaccc

SEQ ID NO: 182282 - DNA, 15 bp, Homo sapiens
gtccctgggcaccca

SEQ ID NO: 182283 - DNA, 15 bp, Homo sapiens
tccctgggcacccag

SEQ ID NO: 182284 - DNA, 15 bp, Homo sapiens
ccctgggcacccagc

SEQ ID NO: 182285 - DNA, 15 bp, Homo sapiens
cctgggcacccagct

SEQ ID NO: 182286 - DNA, 15 bp, Homo sapiens
ctgggcacccagctc

SEQ ID NO: 182287 - DNA, 15 bp, Homo sapiens
tgggcacccagctcg

SEQ ID NO: 182288 - DNA, 15 bp, Homo sapiens
gggcacccagctcgg

SEQ ID NO: 182289 - DNA, 15 bp, Homo sapiens
ggcacccagctcgga

SEQ ID NO: 182290 - DNA, 15 bp, Homo sapiens
gcacccagctcggac

SEQ ID NO: 182291 - DNA, 15 bp, Homo sapiens
cacccagctcggact

SEQ ID NO: 182292 - DNA, 15 bp, Homo sapiens
acccagctcggactc

SEQ ID NO: 182293 - DNA, 15 bp, Homo sapiens
cccagctcggactct

SEQ ID NO: 182294 - DNA, 15 bp, Homo sapiens
ccagctcggactctg

SEQ ID NO: 182295 - DNA, 15 bp, Homo sapiens
cagctcggactctgc

SEQ ID NO: 182296 - DNA, 15 bp, Homo sapiens
agctcggactctgcc

SEQ ID NO: 182297 - DNA, 15 bp, Homo sapiens
gctcggactctgccc

SEQ ID NO: 182298 - DNA, 15 bp, Homo sapiens
ctcggactctgccct

SEQ ID NO: 182299 - DNA, 15 bp, Homo sapiens
tcggactctgccctg

SEQ ID NO: 182300 - DNA, 15 bp, Homo sapiens
cggactctgccctgt

SEQ ID NO: 182301 - DNA, 15 bp, Homo sapiens
ggactctgccctgtc

SEQ ID NO: 182302 - DNA, 15 bp, Homo sapiens
gactctgccctgtca

SEQ ID NO: 182303 - DNA, 15 bp, Homo sapiens
actctgccctgtcag

SEQ ID NO: 182304 - DNA, 15 bp, Homo sapiens
ctctgccctgtcaga

SEQ ID NO: 182305 - DNA, 15 bp, Homo sapiens
tctgccctgtcagaa

SEQ ID NO: 182306 - DNA, 15 bp, Homo sapiens
ctgccctgtcagaag

SEQ ID NO: 182307 - DNA, 15 bp, Homo sapiens
tgccctgtcagaagg

SEQ ID NO: 182308 - DNA, 15 bp, Homo sapiens
gccctgtcagaaggg

SEQ ID NO: 182309 - DNA, 15 bp, Homo sapiens
ccctgtcagaaggga

SEQ ID NO: 182310 - DNA, 15 bp, Homo sapiens
cctgtcagaagggag

SEQ ID NO: 182311 - DNA, 15 bp, Homo sapiens
ctgtcagaagggagc

SEQ ID NO: 182312 - DNA, 15 bp, Homo sapiens
tgtcagaagggagca

SEQ ID NO: 182313 - DNA, 15 bp, Homo sapiens
gtcagaagggagcat

SEQ ID NO: 182314 - DNA, 15 bp, Homo sapiens
tcagaagggagcatt

SEQ ID NO: 182315 - DNA, 15 bp, Homo sapiens
cagaagggagcattt

SEQ ID NO: 182316 - DNA, 15 bp, Homo sapiens
agaagggagcatttg

SEQ ID NO: 182317 - DNA, 15 bp, Homo sapiens
gaagggagcatttga

SEQ ID NO: 182318 - DNA, 15 bp, Homo sapiens
aagggagcatttgaa

SEQ ID NO: 182319 - DNA, 15 bp, Homo sapiens
agggagcatttgaat

SEQ ID NO: 182320 - DNA, 15 bp, Homo sapiens
gggagcatttgaatt

SEQ ID NO: 182321 - DNA, 15 bp, Homo sapiens
ggagcatttgaattt

SEQ ID NO: 182322 - DNA, 15 bp, Homo sapiens
gagcatttgaatttg

SEQ ID NO: 182323 - DNA, 15 bp, Homo sapiens
agcatttgaatttgc

SEQ ID NO: 182324 - DNA, 15 bp, Homo sapiens
gcatttgaatttgct

SEQ ID NO: 182325 - DNA, 15 bp, Homo sapiens
catttgaatttgctg

SEQ ID NO: 182326 - DNA, 15 bp, Homo sapiens
atttgaatttgctgg

SEQ ID NO: 182327 - DNA, 15 bp, Homo sapiens
tttgaatttgctggg

SEQ ID NO: 182328 - DNA, 15 bp, Homo sapiens
ttgaatttgctgggc

SEQ ID NO: 182329 - DNA, 15 bp, Homo sapiens
tgaatttgctgggcc

SEQ ID NO: 182330 - DNA, 15 bp, Homo sapiens
gaatttgctgggcca

SEQ ID NO: 182331 - DNA, 15 bp, Homo sapiens
aatttgctgggccag

SEQ ID NO: 182332 - DNA, 15 bp, Homo sapiens
atttgctgggccagg

SEQ ID NO: 182333 - DNA, 15 bp, Homo sapiens
tttgctgggccaggt

SEQ ID NO: 182334 - DNA, 15 bp, Homo sapiens
ttgctgggccaggtg

SEQ ID NO: 182335 - DNA, 15 bp, Homo sapiens
tgctgggccaggtgg

SEQ ID NO: 182336 - DNA, 15 bp, Homo sapiens
gctgggccaggtgga

SEQ ID NO: 182337 - DNA, 15 bp, Homo sapiens
ctgggccaggtggaa

SEQ ID NO: 182338 - DNA, 15 bp, Homo sapiens
tgggccaggtggaaa

SEQ ID NO: 182339 - DNA, 15 bp, Homo sapiens
gggccaggtggaaaa

SEQ ID NO: 182340 - DNA, 15 bp, Homo sapiens
ggccaggtggaaaac

SEQ ID NO: 182341 - DNA, 15 bp, Homo sapiens
gccaggtggaaaaca

SEQ ID NO: 182342 - DNA, 15 bp, Homo sapiens
ccaggtggaaaacag

SEQ ID NO: 182343 - DNA, 15 bp, Homo sapiens
caggtggaaaacagc

SEQ ID NO: 182344 - DNA, 15 bp, Homo sapiens
aggtggaaaacagct

SEQ ID NO: 182345 - DNA, 15 bp, Homo sapiens
ggtggaaaacagctt

SEQ ID NO: 182346 - DNA, 15 bp, Homo sapiens
gtggaaaacagcttc

SEQ ID NO: 182347 - DNA, 15 bp, Homo sapiens
tggaaaacagcttcc

SEQ ID NO: 182348 - DNA, 15 bp, Homo sapiens
ggaaaacagcttcct

SEQ ID NO: 182349 - DNA, 15 bp, Homo sapiens
gaaaacagcttcctt

SEQ ID NO: 182350 - DNA, 15 bp, Homo sapiens
aaaacagcttccttg

SEQ ID NO: 182351 - DNA, 15 bp, Homo sapiens
aaacagcttccttga

SEQ ID NO: 182352 - DNA, 15 bp, Homo sapiens
aacagcttccttgaa

SEQ ID NO: 182353 - DNA, 15 bp, Homo sapiens
acagcttccttgaaa

SEQ ID NO: 182354 - DNA, 15 bp, Homo sapiens
cagcttccttgaaag

SEQ ID NO: 182355 - DNA, 15 bp, Homo sapiens
agcttccttgaaagg

SEQ ID NO: 182356 - DNA, 15 bp, Homo sapiens
gcttccttgaaaggg

SEQ ID NO: 182357 - DNA, 15 bp, Homo sapiens
cttccttgaaagggc

SEQ ID NO: 182358 - DNA, 15 bp, Homo sapiens
ttccttgaaagggca

SEQ ID NO: 182359 - DNA, 15 bp, Homo sapiens
tccttgaaagggcac

SEQ ID NO: 182360 - DNA, 15 bp, Homo sapiens
ccttgaaagggcact

SEQ ID NO: 182361 - DNA, 15 bp, Homo sapiens
cttgaaagggcactt

SEQ ID NO: 182362 - DNA, 15 bp, Homo sapiens
ttgaaagggcacttt

SEQ ID NO: 182363 - DNA, 15 bp, Homo sapiens
tgaaagggcactttt

SEQ ID NO: 182364 - DNA, 15 bp, Homo sapiens
gaaagggcacttttg

SEQ ID NO: 182365 - DNA, 15 bp, Homo sapiens
aaagggcacttttga

SEQ ID NO: 182366 - DNA, 15 bp, Homo sapiens
aagggcacttttgaa

SEQ ID NO: 182367 - DNA, 15 bp, Homo sapiens
agggcacttttgaag

SEQ ID NO: 182368 - DNA, 15 bp, Homo sapiens
gggcacttttgaaga

SEQ ID NO: 182369 - DNA, 15 bp, Homo sapiens
ggcacttttgaagag

SEQ ID NO: 182370 - DNA, 15 bp, Homo sapiens
gcacttttgaagagt

SEQ ID NO: 182371 - DNA, 15 bp, Homo sapiens
cacttttgaagagta

SEQ ID NO: 182372 - DNA, 15 bp, Homo sapiens
acttttgaagagtac

SEQ ID NO: 182373 - DNA, 15 bp, Homo sapiens
cttttgaagagtaca

SEQ ID NO: 182374 - DNA, 15 bp, Homo sapiens
ttttgaagagtacag

SEQ ID NO: 182375 - DNA, 15 bp, Homo sapiens
tttgaagagtacagg

SEQ ID NO: 182376 - DNA, 15 bp, Homo sapiens
ttgaagagtacaggg

SEQ ID NO: 182377 - DNA, 15 bp, Homo sapiens
tgaagagtacaggga

SEQ ID NO: 182378 - DNA, 15 bp, Homo sapiens
gaagagtacagggaa

SEQ ID NO: 182379 - DNA, 15 bp, Homo sapiens
aagagtacagggaag

SEQ ID NO: 182380 - DNA, 15 bp, Homo sapiens
agagtacagggaagg

SEQ ID NO: 182381 - DNA, 15 bp, Homo sapiens
gagtacagggaagga

SEQ ID NO: 182382 - DNA, 15 bp, Homo sapiens
agtacagggaaggat

SEQ ID NO: 182383 - DNA, 15 bp, Homo sapiens
gtacagggaaggatc

SEQ ID NO: 182384 - DNA, 15 bp, Homo sapiens
tacagggaaggatcc

SEQ ID NO: 182385 - DNA, 15 bp, Homo sapiens
acagggaaggatcct

SEQ ID NO: 182386 - DNA, 15 bp, Homo sapiens
cagggaaggatcctt

SEQ ID NO: 182387 - DNA, 15 bp, Homo sapiens
agggaaggatcctta

SEQ ID NO: 182388 - DNA, 15 bp, Homo sapiens
gggaaggatccttaa

SEQ ID NO: 182389 - DNA, 15 bp, Homo sapiens
ggaaggatccttaaa

SEQ ID NO: 182390 - DNA, 15 bp, Homo sapiens
gaaggatccttaaag

SEQ ID NO: 182391 - DNA, 15 bp, Homo sapiens
aaggatccttaaaga

SEQ ID NO: 182392 - DNA, 15 bp, Homo sapiens
aggatccttaaagag

SEQ ID NO: 182393 - DNA, 15 bp, Homo sapiens
ggatccttaaagagt

SEQ ID NO: 182394 - DNA, 15 bp, Homo sapiens
gatccttaaagagtg

SEQ ID NO: 182395 - DNA, 15 bp, Homo sapiens
atccttaaagagtgg

SEQ ID NO: 182396 - DNA, 15 bp, Homo sapiens
tccttaaagagtgga

SEQ ID NO: 182397 - DNA, 15 bp, Homo sapiens
ccttaaagagtggac

SEQ ID NO: 182398 - DNA, 15 bp, Homo sapiens
cttaaagagtggaca

SEQ ID NO: 182399 - DNA, 15 bp, Homo sapiens
ttaaagagtggacac

SEQ ID NO: 182400 - DNA, 15 bp, Homo sapiens
taaagagtggacaca

SEQ ID NO: 182401 - DNA, 15 bp, Homo sapiens
aaagagtggacacag

SEQ ID NO: 182402 - DNA, 15 bp, Homo sapiens
aagagtggacacagg

SEQ ID NO: 182403 - DNA, 15 bp, Homo sapiens
agagtggacacaggc

SEQ ID NO: 182404 - DNA, 15 bp, Homo sapiens
gagtggacacaggct

SEQ ID NO: 182405 - DNA, 15 bp, Homo sapiens
agtggacacaggctg

SEQ ID NO: 182406 - DNA, 15 bp, Homo sapiens
gtggacacaggctgg

SEQ ID NO: 182407 - DNA, 15 bp, Homo sapiens
tggacacaggctgga

SEQ ID NO: 182408 - DNA, 15 bp, Homo sapiens
ggacacaggctggac

SEQ ID NO: 182409 - DNA, 15 bp, Homo sapiens
gacacaggctggacc

SEQ ID NO: 182410 - DNA, 15 bp, Homo sapiens
acacaggctggaccc

SEQ ID NO: 182411 - DNA, 15 bp, Homo sapiens
cacaggctggaccct

SEQ ID NO: 182412 - DNA, 15 bp, Homo sapiens
acaggctggaccctt

SEQ ID NO: 182413 - DNA, 15 bp, Homo sapiens
caggctggacccttc

SEQ ID NO: 182414 - DNA, 15 bp, Homo sapiens
aggctggacccttca

SEQ ID NO: 182415 - DNA, 15 bp, Homo sapiens
ggctggacccttcat

SEQ ID NO: 182416 - DNA, 15 bp, Homo sapiens
gctggacccttcatg

SEQ ID NO: 182417 - DNA, 15 bp, Homo sapiens
ctggacccttcatga

SEQ ID NO: 182418 - DNA, 15 bp, Homo sapiens
tggacccttcatgac

SEQ ID NO: 182419 - DNA, 15 bp, Homo sapiens
ggacccttcatgacg

SEQ ID NO: 182420 - DNA, 15 bp, Homo sapiens
gacccttcatgacgt

SEQ ID NO: 182421 - DNA, 15 bp, Homo sapiens
acccttcatgacgtg

SEQ ID NO: 182422 - DNA, 15 bp, Homo sapiens
cccttcatgacgtga

SEQ ID NO: 182423 - DNA, 15 bp, Homo sapiens
ccttcatgacgtgac

SEQ ID NO: 182424 - DNA, 15 bp, Homo sapiens
cttcatgacgtgacc

SEQ ID NO: 182425 - DNA, 15 bp, Homo sapiens
ttcatgacgtgaccc

SEQ ID NO: 182426 - DNA, 15 bp, Homo sapiens
tcatgacgtgacccc

SEQ ID NO: 182427 - DNA, 15 bp, Homo sapiens
catgacgtgaccccc

SEQ ID NO: 182428 - DNA, 15 bp, Homo sapiens
atgacgtgaccccca

SEQ ID NO: 182429 - DNA, 15 bp, Homo sapiens
tgacgtgacccccat

SEQ ID NO: 182430 - DNA, 15 bp, Homo sapiens
gacgtgacccccatt

SEQ ID NO: 182431 - DNA, 15 bp, Homo sapiens
acgtgacccccattg

SEQ ID NO: 182432 - DNA, 15 bp, Homo sapiens
cgtgacccccattgg

SEQ ID NO: 182433 - DNA, 15 bp, Homo sapiens
gtgacccccattggc

SEQ ID NO: 182434 - DNA, 15 bp, Homo sapiens
tgacccccattggcc

SEQ ID NO: 182435 - DNA, 15 bp, Homo sapiens
gacccccattggccg

SEQ ID NO: 182436 - DNA, 15 bp, Homo sapiens
acccccattggccga

SEQ ID NO: 182437 - DNA, 15 bp, Homo sapiens
cccccattggccgag

SEQ ID NO: 182438 - DNA, 15 bp, Homo sapiens
ccccattggccgagt

SEQ ID NO: 182439 - DNA, 15 bp, Homo sapiens
cccattggccgagtg

SEQ ID NO: 182440 - DNA, 15 bp, Homo sapiens
ccattggccgagtga

SEQ ID NO: 182441 - DNA, 15 bp, Homo sapiens
cattggccgagtgaa

SEQ ID NO: 182442 - DNA, 15 bp, Homo sapiens
attggccgagtgaaa

SEQ ID NO: 182443 - DNA, 15 bp, Homo sapiens
ttggccgagtgaaag

SEQ ID NO: 182444 - DNA, 15 bp, Homo sapiens
tggccgagtgaaagg

SEQ ID NO: 182445 - DNA, 15 bp, Homo sapiens
ggccgagtgaaagga

SEQ ID NO: 182446 - DNA, 15 bp, Homo sapiens
gccgagtgaaaggat

SEQ ID NO: 182447 - DNA, 15 bp, Homo sapiens
ccgagtgaaaggata

SEQ ID NO: 182448 - DNA, 15 bp, Homo sapiens
cgagtgaaaggatag

SEQ ID NO: 182449 - DNA, 15 bp, Homo sapiens
gagtgaaaggatagc

SEQ ID NO: 182450 - DNA, 15 bp, Homo sapiens
agtgaaaggatagcc

SEQ ID NO: 182451 - DNA, 15 bp, Homo sapiens
gtgaaaggatagcca

SEQ ID NO: 182452 - DNA, 15 bp, Homo sapiens
tgaaaggatagccaa

SEQ ID NO: 182453 - DNA, 15 bp, Homo sapiens
gaaaggatagccaaa

SEQ ID NO: 182454 - DNA, 15 bp, Homo sapiens
aaaggatagccaaat

SEQ ID NO: 182455 - DNA, 15 bp, Homo sapiens
aaggatagccaaata

SEQ ID NO: 182456 - DNA, 15 bp, Homo sapiens
aggatagccaaataa

SEQ ID NO: 182457 - DNA, 15 bp, Homo sapiens
ggatagccaaataag

SEQ ID NO: 182458 - DNA, 15 bp, Homo sapiens
gatagccaaataagt

SEQ ID NO: 182459 - DNA, 15 bp, Homo sapiens
atagccaaataagta

SEQ ID NO: 182460 - DNA, 15 bp, Homo sapiens
tagccaaataagtat

SEQ ID NO: 182461 - DNA, 15 bp, Homo sapiens
agccaaataagtatt

SEQ ID NO: 182462 - DNA, 15 bp, Homo sapiens
gccaaataagtattt

SEQ ID NO: 182463 - DNA, 15 bp, Homo sapiens
ccaaataagtatttg

SEQ ID NO: 182464 - DNA, 15 bp, Homo sapiens
caaataagtatttgg

SEQ ID NO: 182465 - DNA, 15 bp, Homo sapiens
aaataagtatttgga

SEQ ID NO: 182466 - DNA, 15 bp, Homo sapiens
aataagtatttggaa

SEQ ID NO: 182467 - DNA, 15 bp, Homo sapiens
ataagtatttggaaa

SEQ ID NO: 182468 - DNA, 15 bp, Homo sapiens
taagtatttggaaag

SEQ ID NO: 182469 - DNA, 15 bp, Homo sapiens
aagtatttggaaaga

SEQ ID NO: 182470 - DNA, 15 bp, Homo sapiens
agtatttggaaagaa

SEQ ID NO: 182471 - DNA, 15 bp, Homo sapiens
gtatttggaaagaaa

SEQ ID NO: 182472 - DNA, 15 bp, Homo sapiens
tatttggaaagaaag

SEQ ID NO: 182473 - DNA, 15 bp, Homo sapiens
atttggaaagaaagg

SEQ ID NO: 182474 - DNA, 15 bp, Homo sapiens
tttggaaagaaaggg

SEQ ID NO: 182475 - DNA, 15 bp, Homo sapiens
ttggaaagaaaggga

SEQ ID NO: 182476 - DNA, 15 bp, Homo sapiens
tggaaagaaagggag

SEQ ID NO: 182477 - DNA, 15 bp, Homo sapiens
ggaaagaaagggagg

SEQ ID NO: 182478 - DNA, 15 bp, Homo sapiens
gaaagaaagggaggg

SEQ ID NO: 182479 - DNA, 15 bp, Homo sapiens
aaagaaagggagggg

SEQ ID NO: 182480 - DNA, 15 bp, Homo sapiens
aagaaagggaggggc

SEQ ID NO: 182481 - DNA, 15 bp, Homo sapiens
agaaagggaggggcc

SEQ ID NO: 182482 - DNA, 15 bp, Homo sapiens
gaaagggaggggcct

SEQ ID NO: 182483 - DNA, 15 bp, Homo sapiens
aaagggaggggcctg

SEQ ID NO: 182484 - DNA, 15 bp, Homo sapiens
aagggaggggcctgg

SEQ ID NO: 182485 - DNA, 15 bp, Homo sapiens
agggaggggcctggc

SEQ ID NO: 182486 - DNA, 15 bp, Homo sapiens
gggaggggcctggca

SEQ ID NO: 182487 - DNA, 15 bp, Homo sapiens
ggaggggcctggcat

SEQ ID NO: 182488 - DNA, 15 bp, Homo sapiens
gaggggcctggcatg

SEQ ID NO: 182489 - DNA, 15 bp, Homo sapiens
aggggcctggcatgg

SEQ ID NO: 182490 - DNA, 15 bp, Homo sapiens
ggggcctggcatggc

SEQ ID NO: 182491 - DNA, 15 bp, Homo sapiens
gggcctggcatggct

SEQ ID NO: 182492 - DNA, 15 bp, Homo sapiens
ggcctggcatggctc

SEQ ID NO: 182493 - DNA, 15 bp, Homo sapiens
gcctggcatggctca

SEQ ID NO: 182494 - DNA, 15 bp, Homo sapiens
cctggcatggctcac

SEQ ID NO: 182495 - DNA, 15 bp, Homo sapiens
ctggcatggctcacg

SEQ ID NO: 182496 - DNA, 15 bp, Homo sapiens
tggcatggctcacgc

SEQ ID NO: 182497 - DNA, 15 bp, Homo sapiens
ggcatggctcacgcc

SEQ ID NO: 182498 - DNA, 15 bp, Homo sapiens
gcatggctcacgcct

SEQ ID NO: 182499 - DNA, 15 bp, Homo sapiens
catggctcacgcctg

SEQ ID NO: 182500 - DNA, 15 bp, Homo sapiens
atggctcacgcctgt

SEQ ID NO: 182501 - DNA, 15 bp, Homo sapiens
tggctcacgcctgta

SEQ ID NO: 182502 - DNA, 15 bp, Homo sapiens
ggctcacgcctgtaa

SEQ ID NO: 182503 - DNA, 15 bp, Homo sapiens
gctcacgcctgtaaa

SEQ ID NO: 182504 - DNA, 15 bp, Homo sapiens
ctcacgcctgtaaat

SEQ ID NO: 182505 - DNA, 15 bp, Homo sapiens
tcacgcctgtaaatc

SEQ ID NO: 182506 - DNA, 15 bp, Homo sapiens
cacgcctgtaaatcc

SEQ ID NO: 182507 - DNA, 15 bp, Homo sapiens
acgcctgtaaatcca

SEQ ID NO: 182508 - DNA, 15 bp, Homo sapiens
cgcctgtaaatccag

SEQ ID NO: 182509 - DNA, 15 bp, Homo sapiens
gcctgtaaatccagc

SEQ ID NO: 182510 - DNA, 15 bp, Homo sapiens
cctgtaaatccagca

SEQ ID NO: 182511 - DNA, 15 bp, Homo sapiens
ctgtaaatccagcac

SEQ ID NO: 182512 - DNA, 15 bp, Homo sapiens
tgtaaatccagcact

SEQ ID NO: 182513 - DNA, 15 bp, Homo sapiens
gtaaatccagcactt

SEQ ID NO: 182514 - DNA, 15 bp, Homo sapiens
taaatccagcacttc

SEQ ID NO: 182515 - DNA, 15 bp, Homo sapiens
aaatccagcacttct

SEQ ID NO: 182516 - DNA, 15 bp, Homo sapiens
aatccagcacttctg

SEQ ID NO: 182517 - DNA, 15 bp, Homo sapiens
atccagcacttctgg

SEQ ID NO: 182518 - DNA, 15 bp, Homo sapiens
tccagcacttctgga

SEQ ID NO: 182519 - DNA, 15 bp, Homo sapiens
ccagcacttctggag

SEQ ID NO: 182520 - DNA, 15 bp, Homo sapiens
cagcacttctggagg

SEQ ID NO: 182521 - DNA, 15 bp, Homo sapiens
agcacttctggaggc

SEQ ID NO: 182522 - DNA, 15 bp, Homo sapiens
gcacttctggaggcc

SEQ ID NO: 182523 - DNA, 15 bp, Homo sapiens
cacttctggaggccg

SEQ ID NO: 182524 - DNA, 15 bp, Homo sapiens
acttctggaggccga

SEQ ID NO: 182525 - DNA, 15 bp, Homo sapiens
cttctggaggccgat

SEQ ID NO: 182526 - DNA, 15 bp, Homo sapiens
ttctggaggccgatg

SEQ ID NO: 182527 - DNA, 15 bp, Homo sapiens
tctggaggccgatgg

SEQ ID NO: 182528 - DNA, 15 bp, Homo sapiens
ctggaggccgatggg

SEQ ID NO: 182529 - DNA, 15 bp, Homo sapiens
tggaggccgatgggg

SEQ ID NO: 182530 - DNA, 15 bp, Homo sapiens
ggaggccgatggggg

SEQ ID NO: 182531 - DNA, 15 bp, Homo sapiens
gaggccgatgggggt

SEQ ID NO: 182532 - DNA, 15 bp, Homo sapiens
aggccgatgggggtg

SEQ ID NO: 182533 - DNA, 15 bp, Homo sapiens
ggccgatgggggtgg

SEQ ID NO: 182534 - DNA, 15 bp, Homo sapiens
gccgatgggggtgga

SEQ ID NO: 182535 - DNA, 15 bp, Homo sapiens
ccgatgggggtggat

SEQ ID NO: 182536 - DNA, 15 bp, Homo sapiens
cgatgggggtggatc

SEQ ID NO: 182537 - DNA, 15 bp, Homo sapiens
gatgggggtggatca

SEQ ID NO: 182538 - DNA, 15 bp, Homo sapiens
atgggggtggatcat

SEQ ID NO: 182539 - DNA, 15 bp, Homo sapiens
tgggggtggatcatc

SEQ ID NO: 182540 - DNA, 15 bp, Homo sapiens
gggggtggatcatct

SEQ ID NO: 182541 - DNA, 15 bp, Homo sapiens
ggggtggatcatctg

SEQ ID NO: 182542 - DNA, 15 bp, Homo sapiens
gggtggatcatctga

SEQ ID NO: 182543 - DNA, 15 bp, Homo sapiens
ggtggatcatctgag

SEQ ID NO: 182544 - DNA, 15 bp, Homo sapiens
gtggatcatctgagg

SEQ ID NO: 182545 - DNA, 15 bp, Homo sapiens
tggatcatctgaggt

SEQ ID NO: 182546 - DNA, 15 bp, Homo sapiens
ggatcatctgaggtc

SEQ ID NO: 182547 - DNA, 15 bp, Homo sapiens
gatcatctgaggtca

SEQ ID NO: 182548 - DNA, 15 bp, Homo sapiens
atcatctgaggtcag

SEQ ID NO: 182549 - DNA, 15 bp, Homo sapiens
tcatctgaggtcagg

SEQ ID NO: 182550 - DNA, 15 bp, Homo sapiens
catctgaggtcagga

SEQ ID NO: 182551 - DNA, 15 bp, Homo sapiens
atctgaggtcaggag

SEQ ID NO: 182552 - DNA, 15 bp, Homo sapiens
tctgaggtcaggagt

SEQ ID NO: 182553 - DNA, 15 bp, Homo sapiens
ctgaggtcaggagtt

SEQ ID NO: 182554 - DNA, 15 bp, Homo sapiens
tgaggtcaggagttt

SEQ ID NO: 182555 - DNA, 15 bp, Homo sapiens
gaggtcaggagtttg

SEQ ID NO: 182556 - DNA, 15 bp, Homo sapiens
aggtcaggagtttga

SEQ ID NO: 182557 - DNA, 15 bp, Homo sapiens
ggtcaggagtttgag

SEQ ID NO: 182558 - DNA, 15 bp, Homo sapiens
gtcaggagtttgaga

SEQ ID NO: 182559 - DNA, 15 bp, Homo sapiens
tcaggagtttgagac

SEQ ID NO: 182560 - DNA, 15 bp, Homo sapiens
caggagtttgagacc

SEQ ID NO: 182561 - DNA, 15 bp, Homo sapiens
aggagtttgagacca

SEQ ID NO: 182562 - DNA, 15 bp, Homo sapiens
ggagtttgagaccag

SEQ ID NO: 182563 - DNA, 15 bp, Homo sapiens
gagtttgagaccagc

SEQ ID NO: 182564 - DNA, 15 bp, Homo sapiens
agtttgagaccagcc

SEQ ID NO: 182565 - DNA, 15 bp, Homo sapiens
gtttgagaccagcct

SEQ ID NO: 182566 - DNA, 15 bp, Homo sapiens
tttgagaccagcctg

SEQ ID NO: 182567 - DNA, 15 bp, Homo sapiens
ttgagaccagcctgg

SEQ ID NO: 182568 - DNA, 15 bp, Homo sapiens
tgagaccagcctggc

SEQ ID NO: 182569 - DNA, 15 bp, Homo sapiens
accagcctggccaat

SEQ ID NO: 182570 - DNA, 15 bp, Homo sapiens
ccagcctggccaatg

SEQ ID NO: 182571 - DNA, 15 bp, Homo sapiens
cagcctggccaatgt

SEQ ID NO: 182572 - DNA, 15 bp, Homo sapiens
agcctggccaatgtg

SEQ ID NO: 182573 - DNA, 15 bp, Homo sapiens
gcctggccaatgtgg

SEQ ID NO: 182574 - DNA, 15 bp, Homo sapiens
cctggccaatgtggc

SEQ ID NO: 182575 - DNA, 15 bp, Homo sapiens
ctggccaatgtggca

SEQ ID NO: 182576 - DNA, 15 bp, Homo sapiens
tggccaatgtggcaa

SEQ ID NO: 182577 - DNA, 15 bp, Homo sapiens
ggccaatgtggcaaa

SEQ ID NO: 182578 - DNA, 15 bp, Homo sapiens
gccaatgtggcaaaa

SEQ ID NO: 182579 - DNA, 15 bp, Homo sapiens
ccaatgtggcaaaac

SEQ ID NO: 182580 - DNA, 15 bp, Homo sapiens
caatgtggcaaaacc

SEQ ID NO: 182581 - DNA, 15 bp, Homo sapiens
aatgtggcaaaaccc

SEQ ID NO: 182582 - DNA, 15 bp, Homo sapiens
atgtggcaaaacccc

SEQ ID NO: 182583 - DNA, 15 bp, Homo sapiens
tgtggcaaaaccccg

SEQ ID NO: 182584 - DNA, 15 bp, Homo sapiens
gtggcaaaaccccgt

SEQ ID NO: 182585 - DNA, 15 bp, Homo sapiens
tggcaaaaccccgtg

SEQ ID NO: 182586 - DNA, 15 bp, Homo sapiens
ggcaaaaccccgtgt

SEQ ID NO: 182587 - DNA, 15 bp, Homo sapiens
gcaaaaccccgtgtc

SEQ ID NO: 182588 - DNA, 15 bp, Homo sapiens
caaaaccccgtgtct

SEQ ID NO: 182589 - DNA, 15 bp, Homo sapiens
aaaaccccgtgtcta

SEQ ID NO: 182590 - DNA, 15 bp, Homo sapiens
aaaccccgtgtctac

SEQ ID NO: 182591 - DNA, 15 bp, Homo sapiens
aaccccgtgtctact

SEQ ID NO: 182592 - DNA, 15 bp, Homo sapiens
accccgtgtctacta

SEQ ID NO: 182593 - DNA, 15 bp, Homo sapiens
ccccgtgtctactaa

SEQ ID NO: 182594 - DNA, 15 bp, Homo sapiens
cccgtgtctactaaa

SEQ ID NO: 182595 - DNA, 15 bp, Homo sapiens
ccgtgtctactaaaa

SEQ ID NO: 182596 - DNA, 15 bp, Homo sapiens
cgtgtctactaaaaa

SEQ ID NO: 182597 - DNA, 15 bp, Homo sapiens
ggtgtggtggcaggt

SEQ ID NO: 182598 - DNA, 15 bp, Homo sapiens
gtgtggtggcaggtg

SEQ ID NO: 182599 - DNA, 15 bp, Homo sapiens
tgtggtggcaggtgc

SEQ ID NO: 182600 - DNA, 15 bp, Homo sapiens
gtgcctgtagtccct

SEQ ID NO: 182601 - DNA, 15 bp, Homo sapiens
tgcctgtagtccctg

SEQ ID NO: 182602 - DNA, 15 bp, Homo sapiens
gcctgtagtccctgc

SEQ ID NO: 182603 - DNA, 15 bp, Homo sapiens
cctgtagtccctgct

SEQ ID NO: 182604 - DNA, 15 bp, Homo sapiens
ctgtagtccctgcta

SEQ ID NO: 182605 - DNA, 15 bp, Homo sapiens
tgtagtccctgctac

SEQ ID NO: 182606 - DNA, 15 bp, Homo sapiens
gtagtccctgctact

SEQ ID NO: 182607 - DNA, 15 bp, Homo sapiens
tagtccctgctactc

SEQ ID NO: 182608 - DNA, 15 bp, Homo sapiens
agtccctgctactca

SEQ ID NO: 182609 - DNA, 15 bp, Homo sapiens
gtccctgctactcag

SEQ ID NO: 182610 - DNA, 15 bp, Homo sapiens
tccctgctactcagg

SEQ ID NO: 182611 - DNA, 15 bp, Homo sapiens
ccctgctactcagga

SEQ ID NO: 182612 - DNA, 15 bp, Homo sapiens
cctgctactcaggag

SEQ ID NO: 182613 - DNA, 15 bp, Homo sapiens
ctgctactcaggagg

SEQ ID NO: 182614 - DNA, 15 bp, Homo sapiens
tgctactcaggaggc

SEQ ID NO: 182615 - DNA, 15 bp, Homo sapiens
gctactcaggaggct

SEQ ID NO: 182616 - DNA, 15 bp, Homo sapiens
ctactcaggaggctg

SEQ ID NO: 182617 - DNA, 15 bp, Homo sapiens
tactcaggaggctga

SEQ ID NO: 182618 - DNA, 15 bp, Homo sapiens
actcaggaggctgag

SEQ ID NO: 182619 - DNA, 15 bp, Homo sapiens
ctcaggaggctgaga

SEQ ID NO: 182620 - DNA, 15 bp, Homo sapiens
tcaggaggctgagac

SEQ ID NO: 182621 - DNA, 15 bp, Homo sapiens
caggaggctgagaca

SEQ ID NO: 182622 - DNA, 15 bp, Homo sapiens
aggaggctgagacag

SEQ ID NO: 182623 - DNA, 15 bp, Homo sapiens
tgagacaggagaatg

SEQ ID NO: 182624 - DNA, 15 bp, Homo sapiens
gagacaggagaatgg

SEQ ID NO: 182625 - DNA, 15 bp, Homo sapiens
agacaggagaatggc

SEQ ID NO: 182626 - DNA, 15 bp, Homo sapiens
gacaggagaatggct

SEQ ID NO: 182627 - DNA, 15 bp, Homo sapiens
acaggagaatggctt

SEQ ID NO: 182628 - DNA, 15 bp, Homo sapiens
caggagaatggcttg

SEQ ID NO: 182629 - DNA, 15 bp, Homo sapiens
aggagaatggcttga

SEQ ID NO: 182630 - DNA, 15 bp, Homo sapiens
ggagaatggcttgaa

SEQ ID NO: 182631 - DNA, 15 bp, Homo sapiens
gagaatggcttgaac

SEQ ID NO: 182632 - DNA, 15 bp, Homo sapiens
agaatggcttgaacc

SEQ ID NO: 182633 - DNA, 15 bp, Homo sapiens
gaatggcttgaaccc

SEQ ID NO: 182634 - DNA, 15 bp, Homo sapiens
aatggcttgaaccca

SEQ ID NO: 182635 - DNA, 15 bp, Homo sapiens
atggcttgaacccag

SEQ ID NO: 182636 - DNA, 15 bp, Homo sapiens
tggcttgaacccagg

SEQ ID NO: 182637 - DNA, 15 bp, Homo sapiens
ggcttgaacccagga

SEQ ID NO: 182638 - DNA, 15 bp, Homo sapiens
gcttgaacccaggag

SEQ ID NO: 182639 - DNA, 15 bp, Homo sapiens
ccaggaggcagaggt

SEQ ID NO: 182640 - DNA, 15 bp, Homo sapiens
caggaggcagaggtt

SEQ ID NO: 182641 - DNA, 15 bp, Homo sapiens
aggaggcagaggtta

SEQ ID NO: 182642 - DNA, 15 bp, Homo sapiens
gaggcagaggttact

SEQ ID NO: 182643 - DNA, 15 bp, Homo sapiens
aggcagaggttactg

SEQ ID NO: 182644 - DNA, 15 bp, Homo sapiens
ggcagaggttactgc

SEQ ID NO: 182645 - DNA, 15 bp, Homo sapiens
gcagaggttactgca

SEQ ID NO: 182646 - DNA, 15 bp, Homo sapiens
cagaggttactgcag

SEQ ID NO: 182647 - DNA, 15 bp, Homo sapiens
agaggttactgcagc

SEQ ID NO: 182648 - DNA, 15 bp, Homo sapiens
gaggttactgcagca

SEQ ID NO: 182649 - DNA, 15 bp, Homo sapiens
aggttactgcagcaa

SEQ ID NO: 182650 - DNA, 15 bp, Homo sapiens
ggttactgcagcaag

SEQ ID NO: 182651 - DNA, 15 bp, Homo sapiens
gttactgcagcaagc

SEQ ID NO: 182652 - DNA, 15 bp, Homo sapiens
ttactgcagcaagcc

SEQ ID NO: 182653 - DNA, 15 bp, Homo sapiens
tactgcagcaagcca

SEQ ID NO: 182654 - DNA, 15 bp, Homo sapiens
actgcagcaagccaa

SEQ ID NO: 182655 - DNA, 15 bp, Homo sapiens
ctgcagcaagccaag

SEQ ID NO: 182656 - DNA, 15 bp, Homo sapiens
tgcagcaagccaaga

SEQ ID NO: 182657 - DNA, 15 bp, Homo sapiens
gcagcaagccaagat

SEQ ID NO: 182658 - DNA, 15 bp, Homo sapiens
cagcaagccaagatt

SEQ ID NO: 182659 - DNA, 15 bp, Homo sapiens
agcaagccaagattg

SEQ ID NO: 182660 - DNA, 15 bp, Homo sapiens
gcaagccaagattgc

SEQ ID NO: 182661 - DNA, 15 bp, Homo sapiens
caagccaagattgca

SEQ ID NO: 182662 - DNA, 15 bp, Homo sapiens
aagccaagattgcac

SEQ ID NO: 182663 - DNA, 15 bp, Homo sapiens
agccaagattgcacc

SEQ ID NO: 182664 - DNA, 15 bp, Homo sapiens
gccaagattgcacca

SEQ ID NO: 182665 - DNA, 15 bp, Homo sapiens
ccaagattgcaccac

SEQ ID NO: 182666 - DNA, 15 bp, Homo sapiens
caagattgcaccact

SEQ ID NO: 182667 - DNA, 15 bp, Homo sapiens
aagattgcaccactg

SEQ ID NO: 182668 - DNA, 15 bp, Homo sapiens
gcaccactgcactct

SEQ ID NO: 182669 - DNA, 15 bp, Homo sapiens
agcctgggtgacagc

SEQ ID NO: 182670 - DNA, 15 bp, Homo sapiens
gcctgggtgacagcg

SEQ ID NO: 182671 - DNA, 15 bp, Homo sapiens
cctgggtgacagcgg

SEQ ID NO: 182672 - DNA, 15 bp, Homo sapiens
ctgggtgacagcggg

SEQ ID NO: 182673 - DNA, 15 bp, Homo sapiens
tgggtgacagcggga

SEQ ID NO: 182674 - DNA, 15 bp, Homo sapiens
gggtgacagcgggat

SEQ ID NO: 182675 - DNA, 15 bp, Homo sapiens
ggtgacagcgggata

SEQ ID NO: 182676 - DNA, 15 bp, Homo sapiens
gtgacagcgggatac

SEQ ID NO: 182677 - DNA, 15 bp, Homo sapiens
tgacagcgggatact

SEQ ID NO: 182678 - DNA, 15 bp, Homo sapiens
gacagcgggatacta

SEQ ID NO: 182679 - DNA, 15 bp, Homo sapiens
acagcgggatactac

SEQ ID NO: 182680 - DNA, 15 bp, Homo sapiens
cagcgggatactaca

SEQ ID NO: 182681 - DNA, 15 bp, Homo sapiens
agcgggatactacat

SEQ ID NO: 182682 - DNA, 15 bp, Homo sapiens
gcgggatactacatc

SEQ ID NO: 182683 - DNA, 15 bp, Homo sapiens
cgggatactacatct

SEQ ID NO: 182684 - DNA, 15 bp, Homo sapiens
gggatactacatctc

SEQ ID NO: 182685 - DNA, 15 bp, Homo sapiens
ggatactacatctca

SEQ ID NO: 182686 - DNA, 15 bp, Homo sapiens
gatactacatctcaa

SEQ ID NO: 182687 - DNA, 15 bp, Homo sapiens
atactacatctcaaa

SEQ ID NO: 182688 - DNA, 15 bp, Homo sapiens
tactacatctcaaaa

SEQ ID NO: 182689 - DNA, 15 bp, Homo sapiens
actacatctcaaaaa

SEQ ID NO: 182690 - DNA, 15 bp, Homo sapiens
ctacatctcaaaaaa

SEQ ID NO: 182691 - DNA, 15 bp, Homo sapiens
tacatctcaaaaaaa

SEQ ID NO: 182692 - DNA, 15 bp, Homo sapiens
acatctcaaaaaaaa

SEQ ID NO: 182693 - DNA, 15 bp, Homo sapiens
tctcaaaaaaaaaaa

SEQ ID NO: 182694 - DNA, 15 bp, Homo sapiens
aaaaaaaaaaaaaaa

SEQ ID NO: 182695 - DNA, 15 bp, Homo sapiens
aaaaaaaaaaaaaag

SEQ ID NO: 182696 - DNA, 15 bp, Homo sapiens
aaaaaaaaaaaagcg

SEQ ID NO: 182697 - DNA, 15 bp, Homo sapiens
aaaaaaaaaaagcgg

SEQ ID NO: 182698 - DNA, 15 bp, Homo sapiens
aaaaaaaaaagcgga

SEQ ID NO: 182699 - DNA, 15 bp, Homo sapiens
aaaaaaaaagcggag

SEQ ID NO: 182700 - DNA, 15 bp, Homo sapiens
aaaaaaaagcggagc

SEQ ID NO: 182701 - DNA, 15 bp, Homo sapiens
aaaaaaagcggagcg

SEQ ID NO: 182702 - DNA, 15 bp, Homo sapiens
aaaaaagcggagcgg

SEQ ID NO: 182703 - DNA, 15 bp, Homo sapiens
aaaaagcggagcggg

SEQ ID NO: 182704 - DNA, 15 bp, Homo sapiens
aaaagcggagcgggg

SEQ ID NO: 182705 - DNA, 15 bp, Homo sapiens
aaagcggagcggggg

SEQ ID NO: 182706 - DNA, 15 bp, Homo sapiens
aagcggagcgggggt

SEQ ID NO: 182707 - DNA, 15 bp, Homo sapiens
agcggagcgggggtg

SEQ ID NO: 182708 - DNA, 15 bp, Homo sapiens
gcggagcgggggtgg

SEQ ID NO: 182709 - DNA, 15 bp, Homo sapiens
cggagcgggggtgga

SEQ ID NO: 182710 - DNA, 15 bp, Homo sapiens
ggagcgggggtggaa

SEQ ID NO: 182711 - DNA, 15 bp, Homo sapiens
gagcgggggtggaat

SEQ ID NO: 182712 - DNA, 15 bp, Homo sapiens
agcgggggtggaatt

SEQ ID NO: 182713 - DNA, 15 bp, Homo sapiens
gcgggggtggaattt

SEQ ID NO: 182714 - DNA, 15 bp, Homo sapiens
cgggggtggaatttt

SEQ ID NO: 182715 - DNA, 15 bp, Homo sapiens
gggggtggaattttc

SEQ ID NO: 182716 - DNA, 15 bp, Homo sapiens
ggggtggaattttcc

SEQ ID NO: 182717 - DNA, 15 bp, Homo sapiens
gggtggaattttcct

SEQ ID NO: 182718 - DNA, 15 bp, Homo sapiens
ggtggaattttccta

SEQ ID NO: 182719 - DNA, 15 bp, Homo sapiens
gtggaattttcctat

SEQ ID NO: 182720 - DNA, 15 bp, Homo sapiens
tggaattttcctata

SEQ ID NO: 182721 - DNA, 15 bp, Homo sapiens
ggaattttcctatag

SEQ ID NO: 182722 - DNA, 15 bp, Homo sapiens
gaattttcctatagt

SEQ ID NO: 182723 - DNA, 15 bp, Homo sapiens
aattttcctatagtt

SEQ ID NO: 182724 - DNA, 15 bp, Homo sapiens
attttcctatagttt

SEQ ID NO: 182725 - DNA, 15 bp, Homo sapiens
ttttcctatagtttt

SEQ ID NO: 182726 - DNA, 15 bp, Homo sapiens
tttcctatagttttc

SEQ ID NO: 182727 - DNA, 15 bp, Homo sapiens
ttcctatagttttct

SEQ ID NO: 182728 - DNA, 15 bp, Homo sapiens
tcctatagttttctc

SEQ ID NO: 182729 - DNA, 15 bp, Homo sapiens
cctatagttttctcc

SEQ ID NO: 182730 - DNA, 15 bp, Homo sapiens
ctatagttttctcct

SEQ ID NO: 182731 - DNA, 15 bp, Homo sapiens
tatagttttctcctt

SEQ ID NO: 182732 - DNA, 15 bp, Homo sapiens
atagttttctccttt

SEQ ID NO: 182733 - DNA, 15 bp, Homo sapiens
tagttttctccttta

SEQ ID NO: 182734 - DNA, 15 bp, Homo sapiens
agttttctcctttat

SEQ ID NO: 182735 - DNA, 15 bp, Homo sapiens
gttttctcctttatc

SEQ ID NO: 182736 - DNA, 15 bp, Homo sapiens
ttttctcctttatcc

SEQ ID NO: 182737 - DNA, 15 bp, Homo sapiens
tttctcctttatccc

SEQ ID NO: 182738 - DNA, 15 bp, Homo sapiens
ttctcctttatccca

SEQ ID NO: 182739 - DNA, 15 bp, Homo sapiens
tctcctttatcccac

SEQ ID NO: 182740 - DNA, 15 bp, Homo sapiens
ctcctttatcccaca

SEQ ID NO: 182741 - DNA, 15 bp, Homo sapiens
tcctttatcccacac

SEQ ID NO: 182742 - DNA, 15 bp, Homo sapiens
cctttatcccacacc

SEQ ID NO: 182743 - DNA, 15 bp, Homo sapiens
ctttatcccacacct

SEQ ID NO: 182744 - DNA, 15 bp, Homo sapiens
tttatcccacacctg

SEQ ID NO: 182745 - DNA, 15 bp, Homo sapiens
ttatcccacacctga

SEQ ID NO: 182746 - DNA, 15 bp, Homo sapiens
tatcccacacctgaa

SEQ ID NO: 182747 - DNA, 15 bp, Homo sapiens
atcccacacctgaac

SEQ ID NO: 182748 - DNA, 15 bp, Homo sapiens
tcccacacctgaact

SEQ ID NO: 182749 - DNA, 15 bp, Homo sapiens
cccacacctgaactc

SEQ ID NO: 182750 - DNA, 15 bp, Homo sapiens
ccacacctgaactcc

SEQ ID NO: 182751 - DNA, 15 bp, Homo sapiens
cacacctgaactcca

SEQ ID NO: 182752 - DNA, 15 bp, Homo sapiens
acacctgaactccaa

SEQ ID NO: 182753 - DNA, 15 bp, Homo sapiens
cacctgaactccaaa

SEQ ID NO: 182754 - DNA, 15 bp, Homo sapiens
acctgaactccaaag

SEQ ID NO: 182755 - DNA, 15 bp, Homo sapiens
cctgaactccaaagg

SEQ ID NO: 182756 - DNA, 15 bp, Homo sapiens
ctgaactccaaaggg

SEQ ID NO: 182757 - DNA, 15 bp, Homo sapiens
tgaactccaaagggc

SEQ ID NO: 182758 - DNA, 15 bp, Homo sapiens
gaactccaaagggca

SEQ ID NO: 182759 - DNA, 15 bp, Homo sapiens
aactccaaagggcag

SEQ ID NO: 182760 - DNA, 15 bp, Homo sapiens
actccaaagggcagg

SEQ ID NO: 182761 - DNA, 15 bp, Homo sapiens
ctccaaagggcaggg

SEQ ID NO: 182762 - DNA, 15 bp, Homo sapiens
tccaaagggcagggt

SEQ ID NO: 182763 - DNA, 15 bp, Homo sapiens
ccaaagggcagggta

SEQ ID NO: 182764 - DNA, 15 bp, Homo sapiens
caaagggcagggtag

SEQ ID NO: 182765 - DNA, 15 bp, Homo sapiens
aaagggcagggtaga

SEQ ID NO: 182766 - DNA, 15 bp, Homo sapiens
aagggcagggtagag

SEQ ID NO: 182767 - DNA, 15 bp, Homo sapiens
agggcagggtagagt

SEQ ID NO: 182768 - DNA, 15 bp, Homo sapiens
gggcagggtagagtt

SEQ ID NO: 182769 - DNA, 15 bp, Homo sapiens
ggcagggtagagttt

SEQ ID NO: 182770 - DNA, 15 bp, Homo sapiens
gcagggtagagtttc

SEQ ID NO: 182771 - DNA, 15 bp, Homo sapiens
cagggtagagtttcc

SEQ ID NO: 182772 - DNA, 15 bp, Homo sapiens
agggtagagtttcca

SEQ ID NO: 182773 - DNA, 15 bp, Homo sapiens
gggtagagtttccag

SEQ ID NO: 182774 - DNA, 15 bp, Homo sapiens
ggtagagtttccagc

SEQ ID NO: 182775 - DNA, 15 bp, Homo sapiens
gtagagtttccagca

SEQ ID NO: 182776 - DNA, 15 bp, Homo sapiens
tagagtttccagcaa

SEQ ID NO: 182777 - DNA, 15 bp, Homo sapiens
agagtttccagcaag

SEQ ID NO: 182778 - DNA, 15 bp, Homo sapiens
gagtttccagcaagt

SEQ ID NO: 182779 - DNA, 15 bp, Homo sapiens
agtttccagcaagtt

SEQ ID NO: 182780 - DNA, 15 bp, Homo sapiens
gtttccagcaagttt

SEQ ID NO: 182781 - DNA, 15 bp, Homo sapiens
tttccagcaagtttc

SEQ ID NO: 182782 - DNA, 15 bp, Homo sapiens
ttccagcaagtttcc

SEQ ID NO: 182783 - DNA, 15 bp, Homo sapiens
tccagcaagtttcca

SEQ ID NO: 182784 - DNA, 15 bp, Homo sapiens
ccagcaagtttccag

SEQ ID NO: 182785 - DNA, 15 bp, Homo sapiens
cagcaagtttccagg

SEQ ID NO: 182786 - DNA, 15 bp, Homo sapiens
agcaagtttccaggc

SEQ ID NO: 182787 - DNA, 15 bp, Homo sapiens
gcaagtttccaggca

SEQ ID NO: 182788 - DNA, 15 bp, Homo sapiens
caagtttccaggcat

SEQ ID NO: 182789 - DNA, 15 bp, Homo sapiens
aagtttccaggcatg

SEQ ID NO: 182790 - DNA, 15 bp, Homo sapiens
agtttccaggcatgg

SEQ ID NO: 182791 - DNA, 15 bp, Homo sapiens
gtttccaggcatggc

SEQ ID NO: 182792 - DNA, 15 bp, Homo sapiens
tttccaggcatggct

SEQ ID NO: 182793 - DNA, 15 bp, Homo sapiens
ttccaggcatggcta

SEQ ID NO: 182794 - DNA, 15 bp, Homo sapiens
tccaggcatggctaa

SEQ ID NO: 182795 - DNA, 15 bp, Homo sapiens
ccaggcatggctaag

SEQ ID NO: 182796 - DNA, 15 bp, Homo sapiens
caggcatggctaaga

SEQ ID NO: 182797 - DNA, 15 bp, Homo sapiens
aggcatggctaagag

SEQ ID NO: 182798 - DNA, 15 bp, Homo sapiens
ggcatggctaagaga

SEQ ID NO: 182799 - DNA, 15 bp, Homo sapiens
gcatggctaagagac

SEQ ID NO: 182800 - DNA, 15 bp, Homo sapiens
catggctaagagaca

SEQ ID NO: 182801 - DNA, 15 bp, Homo sapiens
atggctaagagacag

SEQ ID NO: 182802 - DNA, 15 bp, Homo sapiens
tggctaagagacagg

SEQ ID NO: 182803 - DNA, 15 bp, Homo sapiens
ggctaagagacaggt

SEQ ID NO: 182804 - DNA, 15 bp, Homo sapiens
gctaagagacaggtg

SEQ ID NO: 182805 - DNA, 15 bp, Homo sapiens
ctaagagacaggtgg

SEQ ID NO: 182806 - DNA, 15 bp, Homo sapiens
taagagacaggtggt

SEQ ID NO: 182807 - DNA, 15 bp, Homo sapiens
aagagacaggtggtt

SEQ ID NO: 182808 - DNA, 15 bp, Homo sapiens
agagacaggtggttg

SEQ ID NO: 182809 - DNA, 15 bp, Homo sapiens
gagacaggtggttga

SEQ ID NO: 182810 - DNA, 15 bp, Homo sapiens
agacaggtggttgaa

SEQ ID NO: 182811 - DNA, 15 bp, Homo sapiens
gacaggtggttgaag

SEQ ID NO: 182812 - DNA, 15 bp, Homo sapiens
acaggtggttgaagg

SEQ ID NO: 182813 - DNA, 15 bp, Homo sapiens
caggtggttgaaggt

SEQ ID NO: 182814 - DNA, 15 bp, Homo sapiens
aggtggttgaaggtc

SEQ ID NO: 182815 - DNA, 15 bp, Homo sapiens
ggtggttgaaggtct

SEQ ID NO: 182816 - DNA, 15 bp, Homo sapiens
gtggttgaaggtctt

SEQ ID NO: 182817 - DNA, 15 bp, Homo sapiens
tggttgaaggtcttc

SEQ ID NO: 182818 - DNA, 15 bp, Homo sapiens
ggttgaaggtcttct

SEQ ID NO: 182819 - DNA, 15 bp, Homo sapiens
gttgaaggtcttcta

SEQ ID NO: 182820 - DNA, 15 bp, Homo sapiens
ttgaaggtcttctat

SEQ ID NO: 182821 - DNA, 15 bp, Homo sapiens
tgaaggtcttctatg

SEQ ID NO: 182822 - DNA, 15 bp, Homo sapiens
gaaggtcttctatga

SEQ ID NO: 182823 - DNA, 15 bp, Homo sapiens
aaggtcttctatgaa

SEQ ID NO: 182824 - DNA, 15 bp, Homo sapiens
aggtcttctatgaag

SEQ ID NO: 182825 - DNA, 15 bp, Homo sapiens
ggtcttctatgaaga

SEQ ID NO: 182826 - DNA, 15 bp, Homo sapiens
gtcttctatgaagaa

SEQ ID NO: 182827 - DNA, 15 bp, Homo sapiens
tcttctatgaagaaa

SEQ ID NO: 182828 - DNA, 15 bp, Homo sapiens
cttctatgaagaaag

SEQ ID NO: 182829 - DNA, 15 bp, Homo sapiens
ttctatgaagaaagc

SEQ ID NO: 182830 - DNA, 15 bp, Homo sapiens
tctatgaagaaagct

SEQ ID NO: 182831 - DNA, 15 bp, Homo sapiens
ctatgaagaaagctt

SEQ ID NO: 182832 - DNA, 15 bp, Homo sapiens
tatgaagaaagctta

SEQ ID NO: 182833 - DNA, 15 bp, Homo sapiens
atgaagaaagcttac

SEQ ID NO: 182834 - DNA, 15 bp, Homo sapiens
tgaagaaagcttact

SEQ ID NO: 182835 - DNA, 15 bp, Homo sapiens
gaagaaagcttactg

SEQ ID NO: 182836 - DNA, 15 bp, Homo sapiens
aagaaagcttactga

SEQ ID NO: 182837 - DNA, 15 bp, Homo sapiens
agaaagcttactgaa

SEQ ID NO: 182838 - DNA, 15 bp, Homo sapiens
gaaagcttactgaag

SEQ ID NO: 182839 - DNA, 15 bp, Homo sapiens
aaagcttactgaagc

SEQ ID NO: 182840 - DNA, 15 bp, Homo sapiens
aagcttactgaagct

SEQ ID NO: 182841 - DNA, 15 bp, Homo sapiens
agcttactgaagctg

SEQ ID NO: 182842 - DNA, 15 bp, Homo sapiens
gcttactgaagctgg

SEQ ID NO: 182843 - DNA, 15 bp, Homo sapiens
cttactgaagctgga

SEQ ID NO: 182844 - DNA, 15 bp, Homo sapiens
ttactgaagctggaa

SEQ ID NO: 182845 - DNA, 15 bp, Homo sapiens
tactgaagctggaaa

SEQ ID NO: 182846 - DNA, 15 bp, Homo sapiens
actgaagctggaaag

SEQ ID NO: 182847 - DNA, 15 bp, Homo sapiens
ctgaagctggaaaga

SEQ ID NO: 182848 - DNA, 15 bp, Homo sapiens
tgaagctggaaagac

SEQ ID NO: 182849 - DNA, 15 bp, Homo sapiens
gaagctggaaagacc

SEQ ID NO: 182850 - DNA, 15 bp, Homo sapiens
aagctggaaagacca

SEQ ID NO: 182851 - DNA, 15 bp, Homo sapiens
agctggaaagaccat

SEQ ID NO: 182852 - DNA, 15 bp, Homo sapiens
gctggaaagaccatc

SEQ ID NO: 182853 - DNA, 15 bp, Homo sapiens
ctggaaagaccatct

SEQ ID NO: 182854 - DNA, 15 bp, Homo sapiens
tggaaagaccatctg

SEQ ID NO: 182855 - DNA, 15 bp, Homo sapiens
ggaaagaccatctga

SEQ ID NO: 182856 - DNA, 15 bp, Homo sapiens
gaaagaccatctgag

SEQ ID NO: 182857 - DNA, 15 bp, Homo sapiens
aaagaccatctgagt

SEQ ID NO: 182858 - DNA, 15 bp, Homo sapiens
aagaccatctgagtt

SEQ ID NO: 182859 - DNA, 15 bp, Homo sapiens
agaccatctgagttc

SEQ ID NO: 182860 - DNA, 15 bp, Homo sapiens
gaccatctgagttca

SEQ ID NO: 182861 - DNA, 15 bp, Homo sapiens
accatctgagttcac

SEQ ID NO: 182862 - DNA, 15 bp, Homo sapiens
ccatctgagttcaca

SEQ ID NO: 182863 - DNA, 15 bp, Homo sapiens
catctgagttcacag

SEQ ID NO: 182864 - DNA, 15 bp, Homo sapiens
atctgagttcacaga

SEQ ID NO: 182865 - DNA, 15 bp, Homo sapiens
tctgagttcacagaa

SEQ ID NO: 182866 - DNA, 15 bp, Homo sapiens
ctgagttcacagaag

SEQ ID NO: 182867 - DNA, 15 bp, Homo sapiens
tgagttcacagaagg

SEQ ID NO: 182868 - DNA, 15 bp, Homo sapiens
gagttcacagaagga

SEQ ID NO: 182869 - DNA, 15 bp, Homo sapiens
agttcacagaaggaa

SEQ ID NO: 182870 - DNA, 15 bp, Homo sapiens
gttcacagaaggaag

SEQ ID NO: 182871 - DNA, 15 bp, Homo sapiens
ttcacagaaggaaga

SEQ ID NO: 182872 - DNA, 15 bp, Homo sapiens
tcacagaaggaagaa

SEQ ID NO: 182873 - DNA, 15 bp, Homo sapiens
cacagaaggaagaat

SEQ ID NO: 182874 - DNA, 15 bp, Homo sapiens
acagaaggaagaatg

SEQ ID NO: 182875 - DNA, 15 bp, Homo sapiens
cagaaggaagaatga

SEQ ID NO: 182876 - DNA, 15 bp, Homo sapiens
agaaggaagaatgag

SEQ ID NO: 182877 - DNA, 15 bp, Homo sapiens
gaaggaagaatgaga

SEQ ID NO: 182878 - DNA, 15 bp, Homo sapiens
aaggaagaatgagag

SEQ ID NO: 182879 - DNA, 15 bp, Homo sapiens
aggaagaatgagagg

SEQ ID NO: 182880 - DNA, 15 bp, Homo sapiens
ggaagaatgagagga

SEQ ID NO: 182881 - DNA, 15 bp, Homo sapiens
gaagaatgagaggag

SEQ ID NO: 182882 - DNA, 15 bp, Homo sapiens
aagaatgagaggagg

SEQ ID NO: 182883 - DNA, 15 bp, Homo sapiens
agaatgagaggaggg

SEQ ID NO: 182884 - DNA, 15 bp, Homo sapiens
gaatgagaggaggga

SEQ ID NO: 182885 - DNA, 15 bp, Homo sapiens
aatgagaggagggaa

SEQ ID NO: 182886 - DNA, 15 bp, Homo sapiens
atgagaggagggaat

SEQ ID NO: 182887 - DNA, 15 bp, Homo sapiens
tgagaggagggaatt

SEQ ID NO: 182888 - DNA, 15 bp, Homo sapiens
gagaggagggaattt

SEQ ID NO: 182889 - DNA, 15 bp, Homo sapiens
agaggagggaattta

SEQ ID NO: 182890 - DNA, 15 bp, Homo sapiens
gaggagggaatttag

SEQ ID NO: 182891 - DNA, 15 bp, Homo sapiens
aggagggaatttaga

SEQ ID NO: 182892 - DNA, 15 bp, Homo sapiens
ggagggaatttagaa

SEQ ID NO: 182893 - DNA, 15 bp, Homo sapiens
gagggaatttagaaa

SEQ ID NO: 182894 - DNA, 15 bp, Homo sapiens
agggaatttagaaag

SEQ ID NO: 182895 - DNA, 15 bp, Homo sapiens
gggaatttagaaagc

SEQ ID NO: 182896 - DNA, 15 bp, Homo sapiens
ggaatttagaaagcc

SEQ ID NO: 182897 - DNA, 15 bp, Homo sapiens
gaatttagaaagcct

SEQ ID NO: 182898 - DNA, 15 bp, Homo sapiens
aatttagaaagcctt

SEQ ID NO: 182899 - DNA, 15 bp, Homo sapiens
atttagaaagccttc

SEQ ID NO: 182900 - DNA, 15 bp, Homo sapiens
tttagaaagccttcc

SEQ ID NO: 182901 - DNA, 15 bp, Homo sapiens
ttagaaagccttcca

SEQ ID NO: 182902 - DNA, 15 bp, Homo sapiens
tagaaagccttccaa

SEQ ID NO: 182903 - DNA, 15 bp, Homo sapiens
agaaagccttccaag

SEQ ID NO: 182904 - DNA, 15 bp, Homo sapiens
gaaagccttccaagc

SEQ ID NO: 182905 - DNA, 15 bp, Homo sapiens
aaagccttccaagct

SEQ ID NO: 182906 - DNA, 15 bp, Homo sapiens
aagccttccaagctg

SEQ ID NO: 182907 - DNA, 15 bp, Homo sapiens
agccttccaagctgg

SEQ ID NO: 182908 - DNA, 15 bp, Homo sapiens
gccttccaagctggg

SEQ ID NO: 182909 - DNA, 15 bp, Homo sapiens
ccttccaagctgggc

SEQ ID NO: 182910 - DNA, 15 bp, Homo sapiens
cttccaagctgggca

SEQ ID NO: 182911 - DNA, 15 bp, Homo sapiens
ttccaagctgggcat

SEQ ID NO: 182912 - DNA, 15 bp, Homo sapiens
tccaagctgggcatg

SEQ ID NO: 182913 - DNA, 15 bp, Homo sapiens
ccaagctgggcatgg

SEQ ID NO: 182914 - DNA, 15 bp, Homo sapiens
caagctgggcatggt

SEQ ID NO: 182915 - DNA, 15 bp, Homo sapiens
aagctgggcatggtg

SEQ ID NO: 182916 - DNA, 15 bp, Homo sapiens
gctgggcatggtggc

SEQ ID NO: 182917 - DNA, 15 bp, Homo sapiens
tgggcatggtggcgt

SEQ ID NO: 182918 - DNA, 15 bp, Homo sapiens
cgcctgtaatcccag

SEQ ID NO: 182919 - DNA, 15 bp, Homo sapiens
cctgtaatcccagct

SEQ ID NO: 182920 - DNA, 15 bp, Homo sapiens
ctgtaatcccagctg

SEQ ID NO: 182921 - DNA, 15 bp, Homo sapiens
tgtaatcccagctgc

SEQ ID NO: 182922 - DNA, 15 bp, Homo sapiens
gtaatcccagctgct

SEQ ID NO: 182923 - DNA, 15 bp, Homo sapiens
taatcccagctgctc

SEQ ID NO: 182924 - DNA, 15 bp, Homo sapiens
aatcccagctgctca

SEQ ID NO: 182925 - DNA, 15 bp, Homo sapiens
atcccagctgctcag

SEQ ID NO: 182926 - DNA, 15 bp, Homo sapiens
tcccagctgctcagg

SEQ ID NO: 182927 - DNA, 15 bp, Homo sapiens
cccagctgctcagga

SEQ ID NO: 182928 - DNA, 15 bp, Homo sapiens
ccagctgctcaggag

SEQ ID NO: 182929 - DNA, 15 bp, Homo sapiens
cagctgctcaggagg

SEQ ID NO: 182930 - DNA, 15 bp, Homo sapiens
agctgctcaggaggc

SEQ ID NO: 182931 - DNA, 15 bp, Homo sapiens
gctgctcaggaggct

SEQ ID NO: 182932 - DNA, 15 bp, Homo sapiens
ctgctcaggaggctg

SEQ ID NO: 182933 - DNA, 15 bp, Homo sapiens
tgctcaggaggctga

SEQ ID NO: 182934 - DNA, 15 bp, Homo sapiens
gctcaggaggctgag

SEQ ID NO: 182935 - DNA, 15 bp, Homo sapiens
ctcaggaggctgagg

SEQ ID NO: 182936 - DNA, 15 bp, Homo sapiens
tcaggaggctgaggc

SEQ ID NO: 182937 - DNA, 15 bp, Homo sapiens
caggaggctgaggca

SEQ ID NO: 182938 - DNA, 15 bp, Homo sapiens
aggaggctgaggcag

SEQ ID NO: 182939 - DNA, 15 bp, Homo sapiens
ggaggctgaggcagg

SEQ ID NO: 182940 - DNA, 15 bp, Homo sapiens
gaggctgaggcagga

SEQ ID NO: 182941 - DNA, 15 bp, Homo sapiens
aggctgaggcaggag

SEQ ID NO: 182942 - DNA, 15 bp, Homo sapiens
ggctgaggcaggaga

SEQ ID NO: 182943 - DNA, 15 bp, Homo sapiens
gctgaggcaggagaa

SEQ ID NO: 182944 - DNA, 15 bp, Homo sapiens
ctgaggcaggagaat

SEQ ID NO: 182945 - DNA, 15 bp, Homo sapiens
tgaggcaggagaatt

SEQ ID NO: 182946 - DNA, 15 bp, Homo sapiens
gaggcaggagaatta

SEQ ID NO: 182947 - DNA, 15 bp, Homo sapiens
aggcaggagaattag

SEQ ID NO: 182948 - DNA, 15 bp, Homo sapiens
ggcaggagaattagg

SEQ ID NO: 182949 - DNA, 15 bp, Homo sapiens
gcaggagaattaggt

SEQ ID NO: 182950 - DNA, 15 bp, Homo sapiens
caggagaattaggta

SEQ ID NO: 182951 - DNA, 15 bp, Homo sapiens
aggagaattaggtaa

SEQ ID NO: 182952 - DNA, 15 bp, Homo sapiens
ggagaattaggtaaa

SEQ ID NO: 182953 - DNA, 15 bp, Homo sapiens
gagaattaggtaaac

SEQ ID NO: 182954 - DNA, 15 bp, Homo sapiens
agaattaggtaaacc

SEQ ID NO: 182955 - DNA, 15 bp, Homo sapiens
gaattaggtaaaccc

SEQ ID NO: 182956 - DNA, 15 bp, Homo sapiens
aattaggtaaaccca

SEQ ID NO: 182957 - DNA, 15 bp, Homo sapiens
attaggtaaacccag

SEQ ID NO: 182958 - DNA, 15 bp, Homo sapiens
ttaggtaaacccagg

SEQ ID NO: 182959 - DNA, 15 bp, Homo sapiens
taggtaaacccagga

SEQ ID NO: 182960 - DNA, 15 bp, Homo sapiens
aggtaaacccaggag

SEQ ID NO: 182961 - DNA, 15 bp, Homo sapiens
ggtaaacccaggagt

SEQ ID NO: 182962 - DNA, 15 bp, Homo sapiens
gtaaacccaggagtt

SEQ ID NO: 182963 - DNA, 15 bp, Homo sapiens
taaacccaggagttg

SEQ ID NO: 182964 - DNA, 15 bp, Homo sapiens
aaacccaggagttgg

SEQ ID NO: 182965 - DNA, 15 bp, Homo sapiens
aacccaggagttgga

SEQ ID NO: 182966 - DNA, 15 bp, Homo sapiens
acccaggagttggag

SEQ ID NO: 182967 - DNA, 15 bp, Homo sapiens
cccaggagttggagt

SEQ ID NO: 182968 - DNA, 15 bp, Homo sapiens
ccaggagttggagtc

SEQ ID NO: 182969 - DNA, 15 bp, Homo sapiens
caggagttggagtcc

SEQ ID NO: 182970 - DNA, 15 bp, Homo sapiens
aggagttggagtcca

SEQ ID NO: 182971 - DNA, 15 bp, Homo sapiens
ggagttggagtccaa

SEQ ID NO: 182972 - DNA, 15 bp, Homo sapiens
gagttggagtccaac

SEQ ID NO: 182973 - DNA, 15 bp, Homo sapiens
agttggagtccaacc

SEQ ID NO: 182974 - DNA, 15 bp, Homo sapiens
gttggagtccaacct

SEQ ID NO: 182975 - DNA, 15 bp, Homo sapiens
ttggagtccaacctg

SEQ ID NO: 182976 - DNA, 15 bp, Homo sapiens
tggagtccaacctgg

SEQ ID NO: 182977 - DNA, 15 bp, Homo sapiens
ggagtccaacctggg

SEQ ID NO: 182978 - DNA, 15 bp, Homo sapiens
gagtccaacctgggc

SEQ ID NO: 182979 - DNA, 15 bp, Homo sapiens
agtccaacctgggca

SEQ ID NO: 182980 - DNA, 15 bp, Homo sapiens
gtccaacctgggcaa

SEQ ID NO: 182981 - DNA, 15 bp, Homo sapiens
tccaacctgggcaac

SEQ ID NO: 182982 - DNA, 15 bp, Homo sapiens
ccaacctgggcaaca

SEQ ID NO: 182983 - DNA, 15 bp, Homo sapiens
caacctgggcaacat

SEQ ID NO: 182984 - DNA, 15 bp, Homo sapiens
aacctgggcaacata

SEQ ID NO: 182985 - DNA, 15 bp, Homo sapiens
acctgggcaacatag

SEQ ID NO: 182986 - DNA, 15 bp, Homo sapiens
cctgggcaacatagc

SEQ ID NO: 182987 - DNA, 15 bp, Homo sapiens
ctgggcaacatagca

SEQ ID NO: 182988 - DNA, 15 bp, Homo sapiens
tgggcaacatagcaa

SEQ ID NO: 182989 - DNA, 15 bp, Homo sapiens
gggcaacatagcaag

SEQ ID NO: 182990 - DNA, 15 bp, Homo sapiens
ggcaacatagcaaga

SEQ ID NO: 182991 - DNA, 15 bp, Homo sapiens
gcaacatagcaagac

SEQ ID NO: 182992 - DNA, 15 bp, Homo sapiens
caacatagcaagacc

SEQ ID NO: 182993 - DNA, 15 bp, Homo sapiens
aacatagcaagaccc

SEQ ID NO: 182994 - DNA, 15 bp, Homo sapiens
acatagcaagacccc

SEQ ID NO: 182995 - DNA, 15 bp, Homo sapiens
catagcaagaccccc

SEQ ID NO: 182996 - DNA, 15 bp, Homo sapiens
atagcaagaccccca

SEQ ID NO: 182997 - DNA, 15 bp, Homo sapiens
tagcaagacccccac

SEQ ID NO: 182998 - DNA, 15 bp, Homo sapiens
agcaagacccccacc

SEQ ID NO: 182999 - DNA, 15 bp, Homo sapiens
gcaagacccccacct

SEQ ID NO: 183000 - DNA, 15 bp, Homo sapiens
caagacccccacctc

SEQ ID NO: 183001 - DNA, 15 bp, Homo sapiens
aagacccccacctct

SEQ ID NO: 183002 - DNA, 15 bp, Homo sapiens
agacccccacctcta

SEQ ID NO: 183003 - DNA, 15 bp, Homo sapiens
gacccccacctctac

SEQ ID NO: 183004 - DNA, 15 bp, Homo sapiens
acccccacctctaca

SEQ ID NO: 183005 - DNA, 15 bp, Homo sapiens
cccccacctctacaa

SEQ ID NO: 183006 - DNA, 15 bp, Homo sapiens
ccccacctctacaaa

SEQ ID NO: 183007 - DNA, 15 bp, Homo sapiens
cccacctctacaaaa

SEQ ID NO: 183008 - DNA, 15 bp, Homo sapiens
ccacctctacaaaaa

SEQ ID NO: 183009 - DNA, 15 bp, Homo sapiens
cacctctacaaaaaa

SEQ ID NO: 183010 - DNA, 15 bp, Homo sapiens
acctctacaaaaaat

SEQ ID NO: 183011 - DNA, 15 bp, Homo sapiens
cctctacaaaaaata

SEQ ID NO: 183012 - DNA, 15 bp, Homo sapiens
ctctacaaaaaataa

SEQ ID NO: 183013 - DNA, 15 bp, Homo sapiens
tctacaaaaaataac

SEQ ID NO: 183014 - DNA, 15 bp, Homo sapiens
ctacaaaaaataacc

SEQ ID NO: 183015 - DNA, 15 bp, Homo sapiens
tacaaaaaataacca

SEQ ID NO: 183016 - DNA, 15 bp, Homo sapiens
acaaaaaataaccag

SEQ ID NO: 183017 - DNA, 15 bp, Homo sapiens
caaaaaataaccagg

SEQ ID NO: 183018 - DNA, 15 bp, Homo sapiens
aaaaaataaccaggc

SEQ ID NO: 183019 - DNA, 15 bp, Homo sapiens
aaaaataaccaggct

SEQ ID NO: 183020 - DNA, 15 bp, Homo sapiens
aaaataaccaggctt

SEQ ID NO: 183021 - DNA, 15 bp, Homo sapiens
aaataaccaggcttg

SEQ ID NO: 183022 - DNA, 15 bp, Homo sapiens
aataaccaggcttgg

SEQ ID NO: 183023 - DNA, 15 bp, Homo sapiens
ataaccaggcttggt

SEQ ID NO: 183024 - DNA, 15 bp, Homo sapiens
taaccaggcttggtg

SEQ ID NO: 183025 - DNA, 15 bp, Homo sapiens
aaccaggcttggtgg

SEQ ID NO: 183026 - DNA, 15 bp, Homo sapiens
accaggcttggtggc

SEQ ID NO: 183027 - DNA, 15 bp, Homo sapiens
ccaggcttggtggca

SEQ ID NO: 183028 - DNA, 15 bp, Homo sapiens
caggcttggtggcac

SEQ ID NO: 183029 - DNA, 15 bp, Homo sapiens
aggcttggtggcaca

SEQ ID NO: 183030 - DNA, 15 bp, Homo sapiens
ggcttggtggcacat

SEQ ID NO: 183031 - DNA, 15 bp, Homo sapiens
gcttggtggcacatg

SEQ ID NO: 183032 - DNA, 15 bp, Homo sapiens
cttggtggcacatgc

SEQ ID NO: 183033 - DNA, 15 bp, Homo sapiens
ttggtggcacatgcc

SEQ ID NO: 183034 - DNA, 15 bp, Homo sapiens
acatgcctgtagtcc

SEQ ID NO: 183035 - DNA, 15 bp, Homo sapiens
ctgtagtcccagctg

SEQ ID NO: 183036 - DNA, 15 bp, Homo sapiens
tgtagtcccagctgc

SEQ ID NO: 183037 - DNA, 15 bp, Homo sapiens
gtagtcccagctgct

SEQ ID NO: 183038 - DNA, 15 bp, Homo sapiens
tagtcccagctgctc

SEQ ID NO: 183039 - DNA, 15 bp, Homo sapiens
agtcccagctgctca

SEQ ID NO: 183040 - DNA, 15 bp, Homo sapiens
gtcccagctgctcag

SEQ ID NO: 183041 - DNA, 15 bp, Homo sapiens
caggaggctgaggct

SEQ ID NO: 183042 - DNA, 15 bp, Homo sapiens
aggaggctgaggctg

SEQ ID NO: 183043 - DNA, 15 bp, Homo sapiens
ggaggctgaggctga

SEQ ID NO: 183044 - DNA, 15 bp, Homo sapiens
gaggctgaggctgaa

SEQ ID NO: 183045 - DNA, 15 bp, Homo sapiens
aggctgaggctgaag

SEQ ID NO: 183046 - DNA, 15 bp, Homo sapiens
ggctgaggctgaagg

SEQ ID NO: 183047 - DNA, 15 bp, Homo sapiens
gctgaggctgaagga

SEQ ID NO: 183048 - DNA, 15 bp, Homo sapiens
ctgaggctgaaggat

SEQ ID NO: 183049 - DNA, 15 bp, Homo sapiens
tgaggctgaaggatc

SEQ ID NO: 183050 - DNA, 15 bp, Homo sapiens
gaggctgaaggatca

SEQ ID NO: 183051 - DNA, 15 bp, Homo sapiens
aggctgaaggatcat

SEQ ID NO: 183052 - DNA, 15 bp, Homo sapiens
ggctgaaggatcatg

SEQ ID NO: 183053 - DNA, 15 bp, Homo sapiens
gctgaaggatcatgt

SEQ ID NO: 183054 - DNA, 15 bp, Homo sapiens
ctgaaggatcatgtg

SEQ ID NO: 183055 - DNA, 15 bp, Homo sapiens
tgaaggatcatgtga

SEQ ID NO: 183056 - DNA, 15 bp, Homo sapiens
gaaggatcatgtgag

SEQ ID NO: 183057 - DNA, 15 bp, Homo sapiens
aaggatcatgtgagc

SEQ ID NO: 183058 - DNA, 15 bp, Homo sapiens
aggatcatgtgagcc

SEQ ID NO: 183059 - DNA, 15 bp, Homo sapiens
ggatcatgtgagcct

SEQ ID NO: 183060 - DNA, 15 bp, Homo sapiens
gatcatgtgagccta

SEQ ID NO: 183061 - DNA, 15 bp, Homo sapiens
atcatgtgagcctag

SEQ ID NO: 183062 - DNA, 15 bp, Homo sapiens
tcatgtgagcctagg

SEQ ID NO: 183063 - DNA, 15 bp, Homo sapiens
catgtgagcctagga

SEQ ID NO: 183064 - DNA, 15 bp, Homo sapiens
atgtgagcctaggag

SEQ ID NO: 183065 - DNA, 15 bp, Homo sapiens
tgtgagcctaggagt

SEQ ID NO: 183066 - DNA, 15 bp, Homo sapiens
gtgagcctaggagtt

SEQ ID NO: 183067 - DNA, 15 bp, Homo sapiens
tgagcctaggagttt

SEQ ID NO: 183068 - DNA, 15 bp, Homo sapiens
gagcctaggagtttg

SEQ ID NO: 183069 - DNA, 15 bp, Homo sapiens
agcctaggagtttga

SEQ ID NO: 183070 - DNA, 15 bp, Homo sapiens
gcctaggagtttgag

SEQ ID NO: 183071 - DNA, 15 bp, Homo sapiens
cctaggagtttgagg

SEQ ID NO: 183072 - DNA, 15 bp, Homo sapiens
ctaggagtttgaggc

SEQ ID NO: 183073 - DNA, 15 bp, Homo sapiens
taggagtttgaggct

SEQ ID NO: 183074 - DNA, 15 bp, Homo sapiens
aggagtttgaggctg

SEQ ID NO: 183075 - DNA, 15 bp, Homo sapiens
ggagtttgaggctgc

SEQ ID NO: 183076 - DNA, 15 bp, Homo sapiens
gagtttgaggctgca

SEQ ID NO: 183077 - DNA, 15 bp, Homo sapiens
agtttgaggctgcag

SEQ ID NO: 183078 - DNA, 15 bp, Homo sapiens
gtttgaggctgcagt

SEQ ID NO: 183079 - DNA, 15 bp, Homo sapiens
tttgaggctgcagtg

SEQ ID NO: 183080 - DNA, 15 bp, Homo sapiens
ttgaggctgcagtga

SEQ ID NO: 183081 - DNA, 15 bp, Homo sapiens
tgaggctgcagtgag

SEQ ID NO: 183082 - DNA, 15 bp, Homo sapiens
gaggctgcagtgagc

SEQ ID NO: 183083 - DNA, 15 bp, Homo sapiens
aggctgcagtgagct

SEQ ID NO: 183084 - DNA, 15 bp, Homo sapiens
ggctgcagtgagctg

SEQ ID NO: 183085 - DNA, 15 bp, Homo sapiens
gctgcagtgagctgt

SEQ ID NO: 183086 - DNA, 15 bp, Homo sapiens
ctgcagtgagctgtg

SEQ ID NO: 183087 - DNA, 15 bp, Homo sapiens
tgcagtgagctgtga

SEQ ID NO: 183088 - DNA, 15 bp, Homo sapiens
gcagtgagctgtgat

SEQ ID NO: 183089 - DNA, 15 bp, Homo sapiens
cagtgagctgtgatc

SEQ ID NO: 183090 - DNA, 15 bp, Homo sapiens
agtgagctgtgatcg

SEQ ID NO: 183091 - DNA, 15 bp, Homo sapiens
gtgagctgtgatcgc

SEQ ID NO: 183092 - DNA, 15 bp, Homo sapiens
tgagctgtgatcgca

SEQ ID NO: 183093 - DNA, 15 bp, Homo sapiens
gagctgtgatcgcac

SEQ ID NO: 183094 - DNA, 15 bp, Homo sapiens
agctgtgatcgcacc

SEQ ID NO: 183095 - DNA, 15 bp, Homo sapiens
gctgtgatcgcacca

SEQ ID NO: 183096 - DNA, 15 bp, Homo sapiens
ctgtgatcgcaccac

SEQ ID NO: 183097 - DNA, 15 bp, Homo sapiens
tgtgatcgcaccact

SEQ ID NO: 183098 - DNA, 15 bp, Homo sapiens
gtgatcgcaccactg

SEQ ID NO: 183099 - DNA, 15 bp, Homo sapiens
tgatcgcaccactgc

SEQ ID NO: 183100 - DNA, 15 bp, Homo sapiens
gatcgcaccactgca

SEQ ID NO: 183101 - DNA, 15 bp, Homo sapiens
caccactgcactcct

SEQ ID NO: 183102 - DNA, 15 bp, Homo sapiens
accactgcactcctg

SEQ ID NO: 183103 - DNA, 15 bp, Homo sapiens
ccactgcactcctgc

SEQ ID NO: 183104 - DNA, 15 bp, Homo sapiens
cactgcactcctgca

SEQ ID NO: 183105 - DNA, 15 bp, Homo sapiens
actgcactcctgcaa

SEQ ID NO: 183106 - DNA, 15 bp, Homo sapiens
ctgcactcctgcaaa

SEQ ID NO: 183107 - DNA, 15 bp, Homo sapiens
tgcactcctgcaaag

SEQ ID NO: 183108 - DNA, 15 bp, Homo sapiens
gcactcctgcaaaga

SEQ ID NO: 183109 - DNA, 15 bp, Homo sapiens
cactcctgcaaagag

SEQ ID NO: 183110 - DNA, 15 bp, Homo sapiens
actcctgcaaagaga

SEQ ID NO: 183111 - DNA, 15 bp, Homo sapiens
ctcctgcaaagagaa

SEQ ID NO: 183112 - DNA, 15 bp, Homo sapiens
tcctgcaaagagaaa

SEQ ID NO: 183113 - DNA, 15 bp, Homo sapiens
cctgcaaagagaaaa

SEQ ID NO: 183114 - DNA, 15 bp, Homo sapiens
ctgcaaagagaaaag

SEQ ID NO: 183115 - DNA, 15 bp, Homo sapiens
tgcaaagagaaaaga

SEQ ID NO: 183116 - DNA, 15 bp, Homo sapiens
gcaaagagaaaagaa

SEQ ID NO: 183117 - DNA, 15 bp, Homo sapiens
caaagagaaaagaaa

SEQ ID NO: 183118 - DNA, 15 bp, Homo sapiens
aaagagaaaagaaag

SEQ ID NO: 183119 - DNA, 15 bp, Homo sapiens
aagagaaaagaaaga

SEQ ID NO: 183120 - DNA, 15 bp, Homo sapiens
agagaaaagaaagat

SEQ ID NO: 183121 - DNA, 15 bp, Homo sapiens
gagaaaagaaagatt

SEQ ID NO: 183122 - DNA, 15 bp, Homo sapiens
agaaaagaaagattt

SEQ ID NO: 183123 - DNA, 15 bp, Homo sapiens
gaaaagaaagatttc

SEQ ID NO: 183124 - DNA, 15 bp, Homo sapiens
aaaagaaagatttca

SEQ ID NO: 183125 - DNA, 15 bp, Homo sapiens
aaagaaagatttcaa

SEQ ID NO: 183126 - DNA, 15 bp, Homo sapiens
aagaaagatttcaag

SEQ ID NO: 183127 - DNA, 15 bp, Homo sapiens
agaaagatttcaagt

SEQ ID NO: 183128 - DNA, 15 bp, Homo sapiens
gaaagatttcaagtc

SEQ ID NO: 183129 - DNA, 15 bp, Homo sapiens
aaagatttcaagtcc

SEQ ID NO: 183130 - DNA, 15 bp, Homo sapiens
aagatttcaagtcca

SEQ ID NO: 183131 - DNA, 15 bp, Homo sapiens
agatttcaagtccat

SEQ ID NO: 183132 - DNA, 15 bp, Homo sapiens
gatttcaagtccatg

SEQ ID NO: 183133 - DNA, 15 bp, Homo sapiens
atttcaagtccatga

SEQ ID NO: 183134 - DNA, 15 bp, Homo sapiens
tttcaagtccatgag

SEQ ID NO: 183135 - DNA, 15 bp, Homo sapiens
ttcaagtccatgagg

SEQ ID NO: 183136 - DNA, 15 bp, Homo sapiens
tcaagtccatgaggg

SEQ ID NO: 183137 - DNA, 15 bp, Homo sapiens
caagtccatgagggc

SEQ ID NO: 183138 - DNA, 15 bp, Homo sapiens
aagtccatgagggcg

SEQ ID NO: 183139 - DNA, 15 bp, Homo sapiens
agtccatgagggcgg

SEQ ID NO: 183140 - DNA, 15 bp, Homo sapiens
gtccatgagggcggc

SEQ ID NO: 183141 - DNA, 15 bp, Homo sapiens
tccatgagggcggct

SEQ ID NO: 183142 - DNA, 15 bp, Homo sapiens
ccatgagggcggcta

SEQ ID NO: 183143 - DNA, 15 bp, Homo sapiens
catgagggcggctag

SEQ ID NO: 183144 - DNA, 15 bp, Homo sapiens
atgagggcggctaga

SEQ ID NO: 183145 - DNA, 15 bp, Homo sapiens
tgagggcggctagaa

SEQ ID NO: 183146 - DNA, 15 bp, Homo sapiens
gagggcggctagaaa

SEQ ID NO: 183147 - DNA, 15 bp, Homo sapiens
agggcggctagaaag

SEQ ID NO: 183148 - DNA, 15 bp, Homo sapiens
gggcggctagaaagt

SEQ ID NO: 183149 - DNA, 15 bp, Homo sapiens
ggcggctagaaagtt

SEQ ID NO: 183150 - DNA, 15 bp, Homo sapiens
gcggctagaaagttg

SEQ ID NO: 183151 - DNA, 15 bp, Homo sapiens
cggctagaaagttgc

SEQ ID NO: 183152 - DNA, 15 bp, Homo sapiens
ggctagaaagttgct

SEQ ID NO: 183153 - DNA, 15 bp, Homo sapiens
gctagaaagttgctg

SEQ ID NO: 183154 - DNA, 15 bp, Homo sapiens
ctagaaagttgctgt

SEQ ID NO: 183155 - DNA, 15 bp, Homo sapiens
tagaaagttgctgta

SEQ ID NO: 183156 - DNA, 15 bp, Homo sapiens
agaaagttgctgtag

SEQ ID NO: 183157 - DNA, 15 bp, Homo sapiens
gaaagttgctgtagg

SEQ ID NO: 183158 - DNA, 15 bp, Homo sapiens
aaagttgctgtaggg

SEQ ID NO: 183159 - DNA, 15 bp, Homo sapiens
aagttgctgtagggc

SEQ ID NO: 183160 - DNA, 15 bp, Homo sapiens
agttgctgtagggcc

SEQ ID NO: 183161 - DNA, 15 bp, Homo sapiens
gttgctgtagggcca

SEQ ID NO: 183162 - DNA, 15 bp, Homo sapiens
ttgctgtagggccat

SEQ ID NO: 183163 - DNA, 15 bp, Homo sapiens
tgctgtagggccatt

SEQ ID NO: 183164 - DNA, 15 bp, Homo sapiens
gctgtagggccattt

SEQ ID NO: 183165 - DNA, 15 bp, Homo sapiens
ctgtagggccattta

SEQ ID NO: 183166 - DNA, 15 bp, Homo sapiens
tgtagggccatttag

SEQ ID NO: 183167 - DNA, 15 bp, Homo sapiens
gtagggccatttaga

SEQ ID NO: 183168 - DNA, 15 bp, Homo sapiens
tagggccatttagat

SEQ ID NO: 183169 - DNA, 15 bp, Homo sapiens
agggccatttagatt

SEQ ID NO: 183170 - DNA, 15 bp, Homo sapiens
gggccatttagatta

SEQ ID NO: 183171 - DNA, 15 bp, Homo sapiens
ggccatttagattag

SEQ ID NO: 183172 - DNA, 15 bp, Homo sapiens
gccatttagattaga

SEQ ID NO: 183173 - DNA, 15 bp, Homo sapiens
ccatttagattagag

SEQ ID NO: 183174 - DNA, 15 bp, Homo sapiens
catttagattagaga

SEQ ID NO: 183175 - DNA, 15 bp, Homo sapiens
atttagattagagaa

SEQ ID NO: 183176 - DNA, 15 bp, Homo sapiens
tttagattagagaag

SEQ ID NO: 183177 - DNA, 15 bp, Homo sapiens
ttagattagagaaga

SEQ ID NO: 183178 - DNA, 15 bp, Homo sapiens
tagattagagaagaa

SEQ ID NO: 183179 - DNA, 15 bp, Homo sapiens
agattagagaagaaa

SEQ ID NO: 183180 - DNA, 15 bp, Homo sapiens
gattagagaagaaaa

SEQ ID NO: 183181 - DNA, 15 bp, Homo sapiens
attagagaagaaaag

SEQ ID NO: 183182 - DNA, 15 bp, Homo sapiens
ttagagaagaaaaga

SEQ ID NO: 183183 - DNA, 15 bp, Homo sapiens
tagagaagaaaagag

SEQ ID NO: 183184 - DNA, 15 bp, Homo sapiens
agagaagaaaagagc

SEQ ID NO: 183185 - DNA, 15 bp, Homo sapiens
gagaagaaaagagcc

SEQ ID NO: 183186 - DNA, 15 bp, Homo sapiens
agaagaaaagagcct

SEQ ID NO: 183187 - DNA, 15 bp, Homo sapiens
gaagaaaagagcctt

SEQ ID NO: 183188 - DNA, 15 bp, Homo sapiens
aagaaaagagccttc

SEQ ID NO: 183189 - DNA, 15 bp, Homo sapiens
agaaaagagccttct

SEQ ID NO: 183190 - DNA, 15 bp, Homo sapiens
gaaaagagccttctc

SEQ ID NO: 183191 - DNA, 15 bp, Homo sapiens
aaaagagccttctca

SEQ ID NO: 183192 - DNA, 15 bp, Homo sapiens
aaagagccttctcaa

SEQ ID NO: 183193 - DNA, 15 bp, Homo sapiens
aagagccttctcaag

SEQ ID NO: 183194 - DNA, 15 bp, Homo sapiens
agagccttctcaaga

SEQ ID NO: 183195 - DNA, 15 bp, Homo sapiens
gagccttctcaagaa

SEQ ID NO: 183196 - DNA, 15 bp, Homo sapiens
agccttctcaagaag

SEQ ID NO: 183197 - DNA, 15 bp, Homo sapiens
gccttctcaagaagg

SEQ ID NO: 183198 - DNA, 15 bp, Homo sapiens
ccttctcaagaaggg

SEQ ID NO: 183199 - DNA, 15 bp, Homo sapiens
cttctcaagaagggc

SEQ ID NO: 183200 - DNA, 15 bp, Homo sapiens
ttctcaagaagggcc

SEQ ID NO: 183201 - DNA, 15 bp, Homo sapiens
tctcaagaagggcct

SEQ ID NO: 183202 - DNA, 15 bp, Homo sapiens
ctcaagaagggcctt

SEQ ID NO: 183203 - DNA, 15 bp, Homo sapiens
tcaagaagggccttc

SEQ ID NO: 183204 - DNA, 15 bp, Homo sapiens
caagaagggccttct

SEQ ID NO: 183205 - DNA, 15 bp, Homo sapiens
aagaagggccttctg

SEQ ID NO: 183206 - DNA, 15 bp, Homo sapiens
agaagggccttctgg

SEQ ID NO: 183207 - DNA, 15 bp, Homo sapiens
gaagggccttctggc

SEQ ID NO: 183208 - DNA, 15 bp, Homo sapiens
aagggccttctggcc

SEQ ID NO: 183209 - DNA, 15 bp, Homo sapiens
agggccttctggccg

SEQ ID NO: 183210 - DNA, 15 bp, Homo sapiens
gggccttctggccgg

SEQ ID NO: 183211 - DNA, 15 bp, Homo sapiens
ggccttctggccggg

SEQ ID NO: 183212 - DNA, 15 bp, Homo sapiens
gccttctggccgggc

SEQ ID NO: 183213 - DNA, 15 bp, Homo sapiens
ccttctggccgggcg

SEQ ID NO: 183214 - DNA, 15 bp, Homo sapiens
cttctggccgggcgc

SEQ ID NO: 183215 - DNA, 15 bp, Homo sapiens
ttctggccgggcgcg

SEQ ID NO: 183216 - DNA, 15 bp, Homo sapiens
tctggccgggcgcgg

SEQ ID NO: 183217 - DNA, 15 bp, Homo sapiens
ctggccgggcgcggt

SEQ ID NO: 183218 - DNA, 15 bp, Homo sapiens
tggccgggcgcggtg

SEQ ID NO: 183219 - DNA, 15 bp, Homo sapiens
ggccgggcgcggtgg

SEQ ID NO: 183220 - DNA, 15 bp, Homo sapiens
gggcgcggtggctca

SEQ ID NO: 183221 - DNA, 15 bp, Homo sapiens
ggcgcggtggctcac

SEQ ID NO: 183222 - DNA, 15 bp, Homo sapiens
gcgcggtggctcacg

SEQ ID NO: 183223 - DNA, 15 bp, Homo sapiens
cgcggtggctcacgc

SEQ ID NO: 183224 - DNA, 15 bp, Homo sapiens
gcggtggctcacgcc

SEQ ID NO: 183225 - DNA, 15 bp, Homo sapiens
cggtggctcacgcct

SEQ ID NO: 183226 - DNA, 15 bp, Homo sapiens
ggtggctcacgcctg

SEQ ID NO: 183227 - DNA, 15 bp, Homo sapiens
gtggctcacgcctgt

SEQ ID NO: 183228 - DNA, 15 bp, Homo sapiens
gctcacgcctgtaat

SEQ ID NO: 183229 - DNA, 15 bp, Homo sapiens
ctcacgcctgtaatc

SEQ ID NO: 183230 - DNA, 15 bp, Homo sapiens
tcacgcctgtaatcc

SEQ ID NO: 183231 - DNA, 15 bp, Homo sapiens
cacgcctgtaatccc

SEQ ID NO: 183232 - DNA, 15 bp, Homo sapiens
acgcctgtaatccca

SEQ ID NO: 183233 - DNA, 15 bp, Homo sapiens
gcactttgggaggcc

SEQ ID NO: 183234 - DNA, 15 bp, Homo sapiens
ttgggaggccgaggc

SEQ ID NO: 183235 - DNA, 15 bp, Homo sapiens
tgggaggccgaggcg

SEQ ID NO: 183236 - DNA, 15 bp, Homo sapiens
gggaggccgaggcgg

SEQ ID NO: 183237 - DNA, 15 bp, Homo sapiens
ggaggccgaggcggg

SEQ ID NO: 183238 - DNA, 15 bp, Homo sapiens
ggcgggtggatcacg

SEQ ID NO: 183239 - DNA, 15 bp, Homo sapiens
gcgggtggatcacga

SEQ ID NO: 183240 - DNA, 15 bp, Homo sapiens
cgggtggatcacgag

SEQ ID NO: 183241 - DNA, 15 bp, Homo sapiens
gggtggatcacgagg

SEQ ID NO: 183242 - DNA, 15 bp, Homo sapiens
ggtggatcacgaggt

SEQ ID NO: 183243 - DNA, 15 bp, Homo sapiens
gtggatcacgaggtc

SEQ ID NO: 183244 - DNA, 15 bp, Homo sapiens
tggatcacgaggtca

SEQ ID NO: 183245 - DNA, 15 bp, Homo sapiens
gatcgagaccatccc

SEQ ID NO: 183246 - DNA, 15 bp, Homo sapiens
atcgagaccatcccg

SEQ ID NO: 183247 - DNA, 15 bp, Homo sapiens
tcgagaccatcccgg

SEQ ID NO: 183248 - DNA, 15 bp, Homo sapiens
cgagaccatcccggc

SEQ ID NO: 183249 - DNA, 15 bp, Homo sapiens
gagaccatcccggct

SEQ ID NO: 183250 - DNA, 15 bp, Homo sapiens
agaccatcccggcta

SEQ ID NO: 183251 - DNA, 15 bp, Homo sapiens
gaccatcccggctaa

SEQ ID NO: 183252 - DNA, 15 bp, Homo sapiens
accatcccggctaaa

SEQ ID NO: 183253 - DNA, 15 bp, Homo sapiens
ccatcccggctaaaa

SEQ ID NO: 183254 - DNA, 15 bp, Homo sapiens
catcccggctaaaac

SEQ ID NO: 183255 - DNA, 15 bp, Homo sapiens
atcccggctaaaacg

SEQ ID NO: 183256 - DNA, 15 bp, Homo sapiens
tcccggctaaaacgg

SEQ ID NO: 183257 - DNA, 15 bp, Homo sapiens
cccggctaaaacggt

SEQ ID NO: 183258 - DNA, 15 bp, Homo sapiens
ccggctaaaacggtg

SEQ ID NO: 183259 - DNA, 15 bp, Homo sapiens
cggctaaaacggtga

SEQ ID NO: 183260 - DNA, 15 bp, Homo sapiens
ggctaaaacggtgaa

SEQ ID NO: 183261 - DNA, 15 bp, Homo sapiens
gctaaaacggtgaaa

SEQ ID NO: 183262 - DNA, 15 bp, Homo sapiens
ctaaaacggtgaaac

SEQ ID NO: 183263 - DNA, 15 bp, Homo sapiens
taaaacggtgaaacc

SEQ ID NO: 183264 - DNA, 15 bp, Homo sapiens
aaaacggtgaaaccc

SEQ ID NO: 183265 - DNA, 15 bp, Homo sapiens
aaacggtgaaacccc

SEQ ID NO: 183266 - DNA, 15 bp, Homo sapiens
aacggtgaaaccccg

SEQ ID NO: 183267 - DNA, 15 bp, Homo sapiens
aaaaatacaaaaaat

SEQ ID NO: 183268 - DNA, 15 bp, Homo sapiens
aaaatacaaaaaatt

SEQ ID NO: 183269 - DNA, 15 bp, Homo sapiens
aaatacaaaaaatta

SEQ ID NO: 183270 - DNA, 15 bp, Homo sapiens
aatacaaaaaattag

SEQ ID NO: 183271 - DNA, 15 bp, Homo sapiens
atacaaaaaattagc

SEQ ID NO: 183272 - DNA, 15 bp, Homo sapiens
tacaaaaaattagcc

SEQ ID NO: 183273 - DNA, 15 bp, Homo sapiens
acaaaaaattagccg

SEQ ID NO: 183274 - DNA, 15 bp, Homo sapiens
caaaaaattagccgg

SEQ ID NO: 183275 - DNA, 15 bp, Homo sapiens
aaaaaattagccggg

SEQ ID NO: 183276 - DNA, 15 bp, Homo sapiens
aattagccgggcgta

SEQ ID NO: 183277 - DNA, 15 bp, Homo sapiens
attagccgggcgtag

SEQ ID NO: 183278 - DNA, 15 bp, Homo sapiens
ttagccgggcgtagt

SEQ ID NO: 183279 - DNA, 15 bp, Homo sapiens
tagccgggcgtagtg

SEQ ID NO: 183280 - DNA, 15 bp, Homo sapiens
agccgggcgtagtgg

SEQ ID NO: 183281 - DNA, 15 bp, Homo sapiens
gccgggcgtagtggc

SEQ ID NO: 183282 - DNA, 15 bp, Homo sapiens
ccgggcgtagtggcg

SEQ ID NO: 183283 - DNA, 15 bp, Homo sapiens
cgggcgtagtggcgg

SEQ ID NO: 183284 - DNA, 15 bp, Homo sapiens
gggcgtagtggcggg

SEQ ID NO: 183285 - DNA, 15 bp, Homo sapiens
ggcgtagtggcgggc

SEQ ID NO: 183286 - DNA, 15 bp, Homo sapiens
gcgtagtggcgggcg

SEQ ID NO: 183287 - DNA, 15 bp, Homo sapiens
cgtagtggcgggcgc

SEQ ID NO: 183288 - DNA, 15 bp, Homo sapiens
gtagtggcgggcgcc

SEQ ID NO: 183289 - DNA, 15 bp, Homo sapiens
tagtggcgggcgcct

SEQ ID NO: 183290 - DNA, 15 bp, Homo sapiens
agtggcgggcgcctg

SEQ ID NO: 183291 - DNA, 15 bp, Homo sapiens
ccagctacttgggag

SEQ ID NO: 183292 - DNA, 15 bp, Homo sapiens
cagctacttgggagg

SEQ ID NO: 183293 - DNA, 15 bp, Homo sapiens
agctacttgggaggc

SEQ ID NO: 183294 - DNA, 15 bp, Homo sapiens
gctacttgggaggct

SEQ ID NO: 183295 - DNA, 15 bp, Homo sapiens
ctacttgggaggctg

SEQ ID NO: 183296 - DNA, 15 bp, Homo sapiens
tacttgggaggctga

SEQ ID NO: 183297 - DNA, 15 bp, Homo sapiens
acttgggaggctgag

SEQ ID NO: 183298 - DNA, 15 bp, Homo sapiens
cttgggaggctgagg

SEQ ID NO: 183299 - DNA, 15 bp, Homo sapiens
tgggaggctgaggca

SEQ ID NO: 183300 - DNA, 15 bp, Homo sapiens
gggaggctgaggcag

SEQ ID NO: 183301 - DNA, 15 bp, Homo sapiens
cagtgagccgagatc

SEQ ID NO: 183302 - DNA, 15 bp, Homo sapiens
agtgagccgagatcc

SEQ ID NO: 183303 - DNA, 15 bp, Homo sapiens
gtgagccgagatccc

SEQ ID NO: 183304 - DNA, 15 bp, Homo sapiens
tgagccgagatcccg

SEQ ID NO: 183305 - DNA, 15 bp, Homo sapiens
gagccgagatcccgc

SEQ ID NO: 183306 - DNA, 15 bp, Homo sapiens
agccgagatcccgcc

SEQ ID NO: 183307 - DNA, 15 bp, Homo sapiens
gccgagatcccgcca

SEQ ID NO: 183308 - DNA, 15 bp, Homo sapiens
ccgagatcccgccac

SEQ ID NO: 183309 - DNA, 15 bp, Homo sapiens
cgagatcccgccact

SEQ ID NO: 183310 - DNA, 15 bp, Homo sapiens
gagatcccgccactg

SEQ ID NO: 183311 - DNA, 15 bp, Homo sapiens
agatcccgccactgc

SEQ ID NO: 183312 - DNA, 15 bp, Homo sapiens
gatcccgccactgca

SEQ ID NO: 183313 - DNA, 15 bp, Homo sapiens
atcccgccactgcac

SEQ ID NO: 183314 - DNA, 15 bp, Homo sapiens
tcccgccactgcact

SEQ ID NO: 183315 - DNA, 15 bp, Homo sapiens
cccgccactgcactc

SEQ ID NO: 183316 - DNA, 15 bp, Homo sapiens
ccgccactgcactcc

SEQ ID NO: 183317 - DNA, 15 bp, Homo sapiens
gccactgcactccag

SEQ ID NO: 183318 - DNA, 15 bp, Homo sapiens
ccactgcactccagc

SEQ ID NO: 183319 - DNA, 15 bp, Homo sapiens
cactgcactccagcc

SEQ ID NO: 183320 - DNA, 15 bp, Homo sapiens
actgcactccagcct

SEQ ID NO: 183321 - DNA, 15 bp, Homo sapiens
ctgcactccagcctg

SEQ ID NO: 183322 - DNA, 15 bp, Homo sapiens
tgcactccagcctgg

SEQ ID NO: 183323 - DNA, 15 bp, Homo sapiens
gcactccagcctggg

SEQ ID NO: 183324 - DNA, 15 bp, Homo sapiens
cactccagcctgggc

SEQ ID NO: 183325 - DNA, 15 bp, Homo sapiens
gacagagcgagactc

SEQ ID NO: 183326 - DNA, 15 bp, Homo sapiens
acagagcgagactcc

SEQ ID NO: 183327 - DNA, 15 bp, Homo sapiens
cagagcgagactccg

SEQ ID NO: 183328 - DNA, 15 bp, Homo sapiens
agagcgagactccgt

SEQ ID NO: 183329 - DNA, 15 bp, Homo sapiens
gagcgagactccgtc

SEQ ID NO: 183330 - DNA, 15 bp, Homo sapiens
agcgagactccgtct

SEQ ID NO: 183331 - DNA, 15 bp, Homo sapiens
gcgagactccgtctc

SEQ ID NO: 183332 - DNA, 15 bp, Homo sapiens
cgagactccgtctca

SEQ ID NO: 183333 - DNA, 15 bp, Homo sapiens
actccgtctcaaaaa

SEQ ID NO: 183334 - DNA, 15 bp, Homo sapiens
ctccgtctcaaaaaa

SEQ ID NO: 183335 - DNA, 15 bp, Homo sapiens
tccgtctcaaaaaaa

SEQ ID NO: 183336 - DNA, 15 bp, Homo sapiens
ccgtctcaaaaaaaa

SEQ ID NO: 183337 - DNA, 15 bp, Homo sapiens
cgtctcaaaaaaaaa

SEQ ID NO: 183338 - DNA, 15 bp, Homo sapiens
gtctcaaaaaaaaaa

SEQ ID NO: 183339 - DNA, 15 bp, Homo sapiens
aaaaaaaaaaaaaga

SEQ ID NO: 183340 - DNA, 15 bp, Homo sapiens
aaaaaaaaaaagaag

SEQ ID NO: 183341 - DNA, 15 bp, Homo sapiens
aaaaaaaaaagaagg

SEQ ID NO: 183342 - DNA, 15 bp, Homo sapiens
aaaaaaaaagaaggg

SEQ ID NO: 183343 - DNA, 15 bp, Homo sapiens
aaaaaaaagaagggc

SEQ ID NO: 183344 - DNA, 15 bp, Homo sapiens
aaaaaaagaagggcc

SEQ ID NO: 183345 - DNA, 15 bp, Homo sapiens
aaaaaagaagggcct

SEQ ID NO: 183346 - DNA, 15 bp, Homo sapiens
aaaaagaagggcctt

SEQ ID NO: 183347 - DNA, 15 bp, Homo sapiens
aaaagaagggccttc

SEQ ID NO: 183348 - DNA, 15 bp, Homo sapiens
aaagaagggccttct

SEQ ID NO: 183349 - DNA, 15 bp, Homo sapiens
aagaagggccttcta

SEQ ID NO: 183350 - DNA, 15 bp, Homo sapiens
agaagggccttctaa

SEQ ID NO: 183351 - DNA, 15 bp, Homo sapiens
gaagggccttctaaa

SEQ ID NO: 183352 - DNA, 15 bp, Homo sapiens
aagggccttctaaaa

SEQ ID NO: 183353 - DNA, 15 bp, Homo sapiens
agggccttctaaaac

SEQ ID NO: 183354 - DNA, 15 bp, Homo sapiens
gggccttctaaaact

SEQ ID NO: 183355 - DNA, 15 bp, Homo sapiens
ggccttctaaaactc

SEQ ID NO: 183356 - DNA, 15 bp, Homo sapiens
gccttctaaaactcc

SEQ ID NO: 183357 - DNA, 15 bp, Homo sapiens
ccttctaaaactcct

SEQ ID NO: 183358 - DNA, 15 bp, Homo sapiens
cttctaaaactcctc

SEQ ID NO: 183359 - DNA, 15 bp, Homo sapiens
ttctaaaactcctct

SEQ ID NO: 183360 - DNA, 15 bp, Homo sapiens
tctaaaactcctctg

SEQ ID NO: 183361 - DNA, 15 bp, Homo sapiens
ctaaaactcctctga

SEQ ID NO: 183362 - DNA, 15 bp, Homo sapiens
taaaactcctctgag

SEQ ID NO: 183363 - DNA, 15 bp, Homo sapiens
aaaactcctctgagt

SEQ ID NO: 183364 - DNA, 15 bp, Homo sapiens
aaactcctctgagtc

SEQ ID NO: 183365 - DNA, 15 bp, Homo sapiens
aactcctctgagtct

SEQ ID NO: 183366 - DNA, 15 bp, Homo sapiens
actcctctgagtctg

SEQ ID NO: 183367 - DNA, 15 bp, Homo sapiens
ctcctctgagtctgt

SEQ ID NO: 183368 - DNA, 15 bp, Homo sapiens
tcctctgagtctgta

SEQ ID NO: 183369 - DNA, 15 bp, Homo sapiens
cctctgagtctgtat

SEQ ID NO: 183370 - DNA, 15 bp, Homo sapiens
ctctgagtctgtata

SEQ ID NO: 183371 - DNA, 15 bp, Homo sapiens
tctgagtctgtatac

SEQ ID NO: 183372 - DNA, 15 bp, Homo sapiens
ctgagtctgtatacg

SEQ ID NO: 183373 - DNA, 15 bp, Homo sapiens
tgagtctgtatacgc

SEQ ID NO: 183374 - DNA, 15 bp, Homo sapiens
gagtctgtatacgct

SEQ ID NO: 183375 - DNA, 15 bp, Homo sapiens
agtctgtatacgctg

SEQ ID NO: 183376 - DNA, 15 bp, Homo sapiens
gtctgtatacgctgt

SEQ ID NO: 183377 - DNA, 15 bp, Homo sapiens
tctgtatacgctgtc

SEQ ID NO: 183378 - DNA, 15 bp, Homo sapiens
ctgtatacgctgtca

SEQ ID NO: 183379 - DNA, 15 bp, Homo sapiens
tgtatacgctgtcat

SEQ ID NO: 183380 - DNA, 15 bp, Homo sapiens
gtatacgctgtcatg

SEQ ID NO: 183381 - DNA, 15 bp, Homo sapiens
tatacgctgtcatgc

SEQ ID NO: 183382 - DNA, 15 bp, Homo sapiens
atacgctgtcatgca

SEQ ID NO: 183383 - DNA, 15 bp, Homo sapiens
tacgctgtcatgcaa

SEQ ID NO: 183384 - DNA, 15 bp, Homo sapiens
acgctgtcatgcaag

SEQ ID NO: 183385 - DNA, 15 bp, Homo sapiens
cgctgtcatgcaaga

SEQ ID NO: 183386 - DNA, 15 bp, Homo sapiens
gctgtcatgcaagac

SEQ ID NO: 183387 - DNA, 15 bp, Homo sapiens
ctgtcatgcaagact

SEQ ID NO: 183388 - DNA, 15 bp, Homo sapiens
tgtcatgcaagacta

SEQ ID NO: 183389 - DNA, 15 bp, Homo sapiens
gtcatgcaagactag

SEQ ID NO: 183390 - DNA, 15 bp, Homo sapiens
tcatgcaagactagg

SEQ ID NO: 183391 - DNA, 15 bp, Homo sapiens
catgcaagactaggt

SEQ ID NO: 183392 - DNA, 15 bp, Homo sapiens
atgcaagactaggtg

SEQ ID NO: 183393 - DNA, 15 bp, Homo sapiens
tgcaagactaggtga

SEQ ID NO: 183394 - DNA, 15 bp, Homo sapiens
gcaagactaggtgag

SEQ ID NO: 183395 - DNA, 15 bp, Homo sapiens
caagactaggtgagt

SEQ ID NO: 183396 - DNA, 15 bp, Homo sapiens
aagactaggtgagtc

SEQ ID NO: 183397 - DNA, 15 bp, Homo sapiens
agactaggtgagtct

SEQ ID NO: 183398 - DNA, 15 bp, Homo sapiens
gactaggtgagtctc

SEQ ID NO: 183399 - DNA, 15 bp, Homo sapiens
actaggtgagtctct

SEQ ID NO: 183400 - DNA, 15 bp, Homo sapiens
ctaggtgagtctcta

SEQ ID NO: 183401 - DNA, 15 bp, Homo sapiens
taggtgagtctctag

SEQ ID NO: 183402 - DNA, 15 bp, Homo sapiens
aggtgagtctctaga

SEQ ID NO: 183403 - DNA, 15 bp, Homo sapiens
ggtgagtctctagaa

SEQ ID NO: 183404 - DNA, 15 bp, Homo sapiens
gtgagtctctagaat

SEQ ID NO: 183405 - DNA, 15 bp, Homo sapiens
tgagtctctagaatc

SEQ ID NO: 183406 - DNA, 15 bp, Homo sapiens
gagtctctagaatca

SEQ ID NO: 183407 - DNA, 15 bp, Homo sapiens
agtctctagaatcaa

SEQ ID NO: 183408 - DNA, 15 bp, Homo sapiens
gtctctagaatcaaa

SEQ ID NO: 183409 - DNA, 15 bp, Homo sapiens
tctctagaatcaaac

SEQ ID NO: 183410 - DNA, 15 bp, Homo sapiens
ctctagaatcaaaca

SEQ ID NO: 183411 - DNA, 15 bp, Homo sapiens
tctagaatcaaacag

SEQ ID NO: 183412 - DNA, 15 bp, Homo sapiens
ctagaatcaaacagt

SEQ ID NO: 183413 - DNA, 15 bp, Homo sapiens
ctgtggacatctttg

SEQ ID NO: 183414 - DNA, 15 bp, Homo sapiens
tgtggacatctttgg

SEQ ID NO: 183415 - DNA, 15 bp, Homo sapiens
gtggacatctttggg

SEQ ID NO: 183416 - DNA, 15 bp, Homo sapiens
tggacatctttgggg

SEQ ID NO: 183417 - DNA, 15 bp, Homo sapiens
ggacatctttgggga

SEQ ID NO: 183418 - DNA, 15 bp, Homo sapiens
gacatctttggggag

SEQ ID NO: 183419 - DNA, 15 bp, Homo sapiens
acatctttggggagc

SEQ ID NO: 183420 - DNA, 15 bp, Homo sapiens
catctttggggagcg

SEQ ID NO: 183421 - DNA, 15 bp, Homo sapiens
atctttggggagcgt

SEQ ID NO: 183422 - DNA, 15 bp, Homo sapiens
tctttggggagcgtt

SEQ ID NO: 183423 - DNA, 15 bp, Homo sapiens
ctttggggagcgtta

SEQ ID NO: 183424 - DNA, 15 bp, Homo sapiens
tttggggagcgttat

SEQ ID NO: 183425 - DNA, 15 bp, Homo sapiens
ttggggagcgttatt

SEQ ID NO: 183426 - DNA, 15 bp, Homo sapiens
tggggagcgttattc

SEQ ID NO: 183427 - DNA, 15 bp, Homo sapiens
ggggagcgttattct

SEQ ID NO: 183428 - DNA, 15 bp, Homo sapiens
gggagcgttattctg

SEQ ID NO: 183429 - DNA, 15 bp, Homo sapiens
ggagcgttattctgc

SEQ ID NO: 183430 - DNA, 15 bp, Homo sapiens
gagcgttattctgct

SEQ ID NO: 183431 - DNA, 15 bp, Homo sapiens
agcgttattctgctt

SEQ ID NO: 183432 - DNA, 15 bp, Homo sapiens
gcgttattctgcttg

SEQ ID NO: 183433 - DNA, 15 bp, Homo sapiens
cgttattctgcttgc

SEQ ID NO: 183434 - DNA, 15 bp, Homo sapiens
gttattctgcttgcc

SEQ ID NO: 183435 - DNA, 15 bp, Homo sapiens
ttattctgcttgcca

SEQ ID NO: 183436 - DNA, 15 bp, Homo sapiens
tattctgcttgccac

SEQ ID NO: 183437 - DNA, 15 bp, Homo sapiens
attctgcttgccaca

SEQ ID NO: 183438 - DNA, 15 bp, Homo sapiens
ttctgcttgccacac

SEQ ID NO: 183439 - DNA, 15 bp, Homo sapiens
tctgcttgccacaca

SEQ ID NO: 183440 - DNA, 15 bp, Homo sapiens
ctgcttgccacacag

SEQ ID NO: 183441 - DNA, 15 bp, Homo sapiens
tgcttgccacacagt

SEQ ID NO: 183442 - DNA, 15 bp, Homo sapiens
gcttgccacacagta

SEQ ID NO: 183443 - DNA, 15 bp, Homo sapiens
cttgccacacagtaa

SEQ ID NO: 183444 - DNA, 15 bp, Homo sapiens
ttgccacacagtaac

SEQ ID NO: 183445 - DNA, 15 bp, Homo sapiens
tgccacacagtaacc

SEQ ID NO: 183446 - DNA, 15 bp, Homo sapiens
gccacacagtaaccc

SEQ ID NO: 183447 - DNA, 15 bp, Homo sapiens
ccacacagtaacccc

SEQ ID NO: 183448 - DNA, 15 bp, Homo sapiens
cacacagtaacccct

SEQ ID NO: 183449 - DNA, 15 bp, Homo sapiens
acacagtaacccctg

SEQ ID NO: 183450 - DNA, 15 bp, Homo sapiens
cacagtaacccctgc

SEQ ID NO: 183451 - DNA, 15 bp, Homo sapiens
acagtaacccctgcc

SEQ ID NO: 183452 - DNA, 15 bp, Homo sapiens
cagtaacccctgcca

SEQ ID NO: 183453 - DNA, 15 bp, Homo sapiens
agtaacccctgccat

SEQ ID NO: 183454 - DNA, 15 bp, Homo sapiens
gtaacccctgccata

SEQ ID NO: 183455 - DNA, 15 bp, Homo sapiens
taacccctgccataa

SEQ ID NO: 183456 - DNA, 15 bp, Homo sapiens
aacccctgccataac

SEQ ID NO: 183457 - DNA, 15 bp, Homo sapiens
acccctgccataact

SEQ ID NO: 183458 - DNA, 15 bp, Homo sapiens
cccctgccataactc

SEQ ID NO: 183459 - DNA, 15 bp, Homo sapiens
ccctgccataactca

SEQ ID NO: 183460 - DNA, 15 bp, Homo sapiens
cctgccataactcag

SEQ ID NO: 183461 - DNA, 15 bp, Homo sapiens
ctgccataactcagg

SEQ ID NO: 183462 - DNA, 15 bp, Homo sapiens
tgccataactcaggg

SEQ ID NO: 183463 - DNA, 15 bp, Homo sapiens
gccataactcagggc

SEQ ID NO: 183464 - DNA, 15 bp, Homo sapiens
ccataactcagggcg

SEQ ID NO: 183465 - DNA, 15 bp, Homo sapiens
cataactcagggcga

SEQ ID NO: 183466 - DNA, 15 bp, Homo sapiens
ataactcagggcgat

SEQ ID NO: 183467 - DNA, 15 bp, Homo sapiens
taactcagggcgatg

SEQ ID NO: 183468 - DNA, 15 bp, Homo sapiens
aactcagggcgatgg

SEQ ID NO: 183469 - DNA, 15 bp, Homo sapiens
actcagggcgatggc

SEQ ID NO: 183470 - DNA, 15 bp, Homo sapiens
ctcagggcgatggca

SEQ ID NO: 183471 - DNA, 15 bp, Homo sapiens
tcagggcgatggcat

SEQ ID NO: 183472 - DNA, 15 bp, Homo sapiens
cagggcgatggcata

SEQ ID NO: 183473 - DNA, 15 bp, Homo sapiens
agggcgatggcatat

SEQ ID NO: 183474 - DNA, 15 bp, Homo sapiens
gggcgatggcatatt

SEQ ID NO: 183475 - DNA, 15 bp, Homo sapiens
ggcgatggcatattc

SEQ ID NO: 183476 - DNA, 15 bp, Homo sapiens
gcgatggcatattct

SEQ ID NO: 183477 - DNA, 15 bp, Homo sapiens
cgatggcatattcta

SEQ ID NO: 183478 - DNA, 15 bp, Homo sapiens
gatggcatattctat

SEQ ID NO: 183479 - DNA, 15 bp, Homo sapiens
atggcatattctatc

SEQ ID NO: 183480 - DNA, 15 bp, Homo sapiens
tggcatattctatca

SEQ ID NO: 183481 - DNA, 15 bp, Homo sapiens
ggcatattctatcat

SEQ ID NO: 183482 - DNA, 15 bp, Homo sapiens
gcatattctatcatt

SEQ ID NO: 183483 - DNA, 15 bp, Homo sapiens
catattctatcatta

SEQ ID NO: 183484 - DNA, 15 bp, Homo sapiens
atattctatcattat

SEQ ID NO: 183485 - DNA, 15 bp, Homo sapiens
tattctatcattatc

SEQ ID NO: 183486 - DNA, 15 bp, Homo sapiens
attctatcattatct

SEQ ID NO: 183487 - DNA, 15 bp, Homo sapiens
ttctatcattatctt

SEQ ID NO: 183488 - DNA, 15 bp, Homo sapiens
tctatcattatcttc

SEQ ID NO: 183489 - DNA, 15 bp, Homo sapiens
ctatcattatcttca

SEQ ID NO: 183490 - DNA, 15 bp, Homo sapiens
tatcattatcttcaa

SEQ ID NO: 183491 - DNA, 15 bp, Homo sapiens
atcattatcttcaat

SEQ ID NO: 183492 - DNA, 15 bp, Homo sapiens
tcattatcttcaatc

SEQ ID NO: 183493 - DNA, 15 bp, Homo sapiens
cattatcttcaatca

SEQ ID NO: 183494 - DNA, 15 bp, Homo sapiens
attatcttcaatcag

SEQ ID NO: 183495 - DNA, 15 bp, Homo sapiens
ttatcttcaatcaga

SEQ ID NO: 183496 - DNA, 15 bp, Homo sapiens
tatcttcaatcagaa

SEQ ID NO: 183497 - DNA, 15 bp, Homo sapiens
atcttcaatcagaaa

SEQ ID NO: 183498 - DNA, 15 bp, Homo sapiens
tcttcaatcagaaac

SEQ ID NO: 183499 - DNA, 15 bp, Homo sapiens
cttcaatcagaaact

SEQ ID NO: 183500 - DNA, 15 bp, Homo sapiens
ttcaatcagaaactg

SEQ ID NO: 183501 - DNA, 15 bp, Homo sapiens
tcaatcagaaactga

SEQ ID NO: 183502 - DNA, 15 bp, Homo sapiens
caatcagaaactgat

SEQ ID NO: 183503 - DNA, 15 bp, Homo sapiens
aatcagaaactgatg

SEQ ID NO: 183504 - DNA, 15 bp, Homo sapiens
atcagaaactgatgt

SEQ ID NO: 183505 - DNA, 15 bp, Homo sapiens
tcagaaactgatgtg

SEQ ID NO: 183506 - DNA, 15 bp, Homo sapiens
cagaaactgatgtgt

SEQ ID NO: 183507 - DNA, 15 bp, Homo sapiens
agaaactgatgtgtg

SEQ ID NO: 183508 - DNA, 15 bp, Homo sapiens
gaaactgatgtgtgg

SEQ ID NO: 183509 - DNA, 15 bp, Homo sapiens
aaactgatgtgtggg

SEQ ID NO: 183510 - DNA, 15 bp, Homo sapiens
aactgatgtgtgggg

SEQ ID NO: 183511 - DNA, 15 bp, Homo sapiens
actgatgtgtgggga

SEQ ID NO: 183512 - DNA, 15 bp, Homo sapiens
ctgatgtgtggggag

SEQ ID NO: 183513 - DNA, 15 bp, Homo sapiens
tgatgtgtggggagg

SEQ ID NO: 183514 - DNA, 15 bp, Homo sapiens
gatgtgtggggaggt

SEQ ID NO: 183515 - DNA, 15 bp, Homo sapiens
atgtgtggggaggtg

SEQ ID NO: 183516 - DNA, 15 bp, Homo sapiens
tgtgtggggaggtga

SEQ ID NO: 183517 - DNA, 15 bp, Homo sapiens
gtgtggggaggtgat

SEQ ID NO: 183518 - DNA, 15 bp, Homo sapiens
tgtggggaggtgatg

SEQ ID NO: 183519 - DNA, 15 bp, Homo sapiens
gtggggaggtgatgt

SEQ ID NO: 183520 - DNA, 15 bp, Homo sapiens
tggggaggtgatgta

SEQ ID NO: 183521 - DNA, 15 bp, Homo sapiens
ggggaggtgatgtat

SEQ ID NO: 183522 - DNA, 15 bp, Homo sapiens
gggaggtgatgtatc

SEQ ID NO: 183523 - DNA, 15 bp, Homo sapiens
ggaggtgatgtatca

SEQ ID NO: 183524 - DNA, 15 bp, Homo sapiens
gaggtgatgtatcat

SEQ ID NO: 183525 - DNA, 15 bp, Homo sapiens
aggtgatgtatcata

SEQ ID NO: 183526 - DNA, 15 bp, Homo sapiens
ggtgatgtatcataa

SEQ ID NO: 183527 - DNA, 15 bp, Homo sapiens
gtgatgtatcataac

SEQ ID NO: 183528 - DNA, 15 bp, Homo sapiens
tgatgtatcataact

SEQ ID NO: 183529 - DNA, 15 bp, Homo sapiens
gatgtatcataactc

SEQ ID NO: 183530 - DNA, 15 bp, Homo sapiens
atgtatcataactca

SEQ ID NO: 183531 - DNA, 15 bp, Homo sapiens
tgtatcataactcat

SEQ ID NO: 183532 - DNA, 15 bp, Homo sapiens
gtatcataactcatc

SEQ ID NO: 183533 - DNA, 15 bp, Homo sapiens
tatcataactcatcc

SEQ ID NO: 183534 - DNA, 15 bp, Homo sapiens
atcataactcatcca

SEQ ID NO: 183535 - DNA, 15 bp, Homo sapiens
tcataactcatccag

SEQ ID NO: 183536 - DNA, 15 bp, Homo sapiens
cataactcatccagg

SEQ ID NO: 183537 - DNA, 15 bp, Homo sapiens
ataactcatccaggg

SEQ ID NO: 183538 - DNA, 15 bp, Homo sapiens
taactcatccagggt

SEQ ID NO: 183539 - DNA, 15 bp, Homo sapiens
aactcatccagggtc

SEQ ID NO: 183540 - DNA, 15 bp, Homo sapiens
actcatccagggtca

SEQ ID NO: 183541 - DNA, 15 bp, Homo sapiens
ctcatccagggtcag

SEQ ID NO: 183542 - DNA, 15 bp, Homo sapiens
tcatccagggtcagg

SEQ ID NO: 183543 - DNA, 15 bp, Homo sapiens
catccagggtcaggc

SEQ ID NO: 183544 - DNA, 15 bp, Homo sapiens
atccagggtcaggca

SEQ ID NO: 183545 - DNA, 15 bp, Homo sapiens
tccagggtcaggcag

SEQ ID NO: 183546 - DNA, 15 bp, Homo sapiens
ccagggtcaggcagc

SEQ ID NO: 183547 - DNA, 15 bp, Homo sapiens
cagggtcaggcagct

SEQ ID NO: 183548 - DNA, 15 bp, Homo sapiens
agggtcaggcagctg

SEQ ID NO: 183549 - DNA, 15 bp, Homo sapiens
gggtcaggcagctgg

SEQ ID NO: 183550 - DNA, 15 bp, Homo sapiens
ggtcaggcagctgga

SEQ ID NO: 183551 - DNA, 15 bp, Homo sapiens
gtcaggcagctggat

SEQ ID NO: 183552 - DNA, 15 bp, Homo sapiens
tcaggcagctggatt

SEQ ID NO: 183553 - DNA, 15 bp, Homo sapiens
caggcagctggattt

SEQ ID NO: 183554 - DNA, 15 bp, Homo sapiens
aggcagctggatttg

SEQ ID NO: 183555 - DNA, 15 bp, Homo sapiens
ggcagctggatttga

SEQ ID NO: 183556 - DNA, 15 bp, Homo sapiens
gcagctggatttgaa

SEQ ID NO: 183557 - DNA, 15 bp, Homo sapiens
cagctggatttgaac

SEQ ID NO: 183558 - DNA, 15 bp, Homo sapiens
agctggatttgaacc

SEQ ID NO: 183559 - DNA, 15 bp, Homo sapiens
gctggatttgaacct

SEQ ID NO: 183560 - DNA, 15 bp, Homo sapiens
ctggatttgaacctg

SEQ ID NO: 183561 - DNA, 15 bp, Homo sapiens
tggatttgaacctgc

SEQ ID NO: 183562 - DNA, 15 bp, Homo sapiens
ggatttgaacctgcc

SEQ ID NO: 183563 - DNA, 15 bp, Homo sapiens
gatttgaacctgcct

SEQ ID NO: 183564 - DNA, 15 bp, Homo sapiens
atttgaacctgcctg

SEQ ID NO: 183565 - DNA, 15 bp, Homo sapiens
tttgaacctgcctga

SEQ ID NO: 183566 - DNA, 15 bp, Homo sapiens
ttgaacctgcctgac

SEQ ID NO: 183567 - DNA, 15 bp, Homo sapiens
tgaacctgcctgacc

SEQ ID NO: 183568 - DNA, 15 bp, Homo sapiens
gaacctgcctgaccc

SEQ ID NO: 183569 - DNA, 15 bp, Homo sapiens
aacctgcctgaccct

SEQ ID NO: 183570 - DNA, 15 bp, Homo sapiens
acctgcctgaccctt

SEQ ID NO: 183571 - DNA, 15 bp, Homo sapiens
cctgcctgaccctta

SEQ ID NO: 183572 - DNA, 15 bp, Homo sapiens
ctgcctgacccttag

SEQ ID NO: 183573 - DNA, 15 bp, Homo sapiens
tgcctgacccttaga

SEQ ID NO: 183574 - DNA, 15 bp, Homo sapiens
gcctgacccttagat

SEQ ID NO: 183575 - DNA, 15 bp, Homo sapiens
cctgacccttagatt

SEQ ID NO: 183576 - DNA, 15 bp, Homo sapiens
ctgacccttagattt

SEQ ID NO: 183577 - DNA, 15 bp, Homo sapiens
tgacccttagatttg

SEQ ID NO: 183578 - DNA, 15 bp, Homo sapiens
gacccttagatttga

SEQ ID NO: 183579 - DNA, 15 bp, Homo sapiens
acccttagatttgag

SEQ ID NO: 183580 - DNA, 15 bp, Homo sapiens
cccttagatttgagg

SEQ ID NO: 183581 - DNA, 15 bp, Homo sapiens
ccttagatttgaggt

SEQ ID NO: 183582 - DNA, 15 bp, Homo sapiens
cttagatttgaggtt

SEQ ID NO: 183583 - DNA, 15 bp, Homo sapiens
ttagatttgaggttt

SEQ ID NO: 183584 - DNA, 15 bp, Homo sapiens
tagatttgaggtttt

SEQ ID NO: 183585 - DNA, 15 bp, Homo sapiens
agatttgaggttttc

SEQ ID NO: 183586 - DNA, 15 bp, Homo sapiens
gatttgaggttttct

SEQ ID NO: 183587 - DNA, 15 bp, Homo sapiens
atttgaggttttctg

SEQ ID NO: 183588 - DNA, 15 bp, Homo sapiens
tttgaggttttctgg

SEQ ID NO: 183589 - DNA, 15 bp, Homo sapiens
ttgaggttttctggc

SEQ ID NO: 183590 - DNA, 15 bp, Homo sapiens
tgaggttttctggct

SEQ ID NO: 183591 - DNA, 15 bp, Homo sapiens
gaggttttctggctc

SEQ ID NO: 183592 - DNA, 15 bp, Homo sapiens
aggttttctggctcc

SEQ ID NO: 183593 - DNA, 15 bp, Homo sapiens
ggttttctggctcca

SEQ ID NO: 183594 - DNA, 15 bp, Homo sapiens
gttttctggctccag

SEQ ID NO: 183595 - DNA, 15 bp, Homo sapiens
ttttctggctccaga

SEQ ID NO: 183596 - DNA, 15 bp, Homo sapiens
tttctggctccagaa

SEQ ID NO: 183597 - DNA, 15 bp, Homo sapiens
ttctggctccagaat

SEQ ID NO: 183598 - DNA, 15 bp, Homo sapiens
tctggctccagaatc

SEQ ID NO: 183599 - DNA, 15 bp, Homo sapiens
ctggctccagaatct

SEQ ID NO: 183600 - DNA, 15 bp, Homo sapiens
tggctccagaatctt

SEQ ID NO: 183601 - DNA, 15 bp, Homo sapiens
ggctccagaatcttc

SEQ ID NO: 183602 - DNA, 15 bp, Homo sapiens
gctccagaatcttct

SEQ ID NO: 183603 - DNA, 15 bp, Homo sapiens
ctccagaatcttctc

SEQ ID NO: 183604 - DNA, 15 bp, Homo sapiens
tccagaatcttctct

SEQ ID NO: 183605 - DNA, 15 bp, Homo sapiens
ccagaatcttctctg

SEQ ID NO: 183606 - DNA, 15 bp, Homo sapiens
cagaatcttctctga

SEQ ID NO: 183607 - DNA, 15 bp, Homo sapiens
agaatcttctctgaa

SEQ ID NO: 183608 - DNA, 15 bp, Homo sapiens
gaatcttctctgaag

SEQ ID NO: 183609 - DNA, 15 bp, Homo sapiens
aatcttctctgaagt

SEQ ID NO: 183610 - DNA, 15 bp, Homo sapiens
atcttctctgaagtg

SEQ ID NO: 183611 - DNA, 15 bp, Homo sapiens
tcttctctgaagtga

SEQ ID NO: 183612 - DNA, 15 bp, Homo sapiens
cttctctgaagtgaa

SEQ ID NO: 183613 - DNA, 15 bp, Homo sapiens
ttctctgaagtgaaa

SEQ ID NO: 183614 - DNA, 15 bp, Homo sapiens
tctctgaagtgaaag

SEQ ID NO: 183615 - DNA, 15 bp, Homo sapiens
ctctgaagtgaaagg

SEQ ID NO: 183616 - DNA, 15 bp, Homo sapiens
tctgaagtgaaaggc

SEQ ID NO: 183617 - DNA, 15 bp, Homo sapiens
ctgaagtgaaaggca

SEQ ID NO: 183618 - DNA, 15 bp, Homo sapiens
tgaagtgaaaggcat

SEQ ID NO: 183619 - DNA, 15 bp, Homo sapiens
gaagtgaaaggcatg

SEQ ID NO: 183620 - DNA, 15 bp, Homo sapiens
aagtgaaaggcatga

SEQ ID NO: 183621 - DNA, 15 bp, Homo sapiens
agtgaaaggcatgag

SEQ ID NO: 183622 - DNA, 15 bp, Homo sapiens
gtgaaaggcatgagg

SEQ ID NO: 183623 - DNA, 15 bp, Homo sapiens
tgaaaggcatgaggc

SEQ ID NO: 183624 - DNA, 15 bp, Homo sapiens
gaaaggcatgaggcc

SEQ ID NO: 183625 - DNA, 15 bp, Homo sapiens
aaaggcatgaggccg

SEQ ID NO: 183626 - DNA, 15 bp, Homo sapiens
aaggcatgaggccga

SEQ ID NO: 183627 - DNA, 15 bp, Homo sapiens
aggcatgaggccgac

SEQ ID NO: 183628 - DNA, 15 bp, Homo sapiens
ggcatgaggccgacc

SEQ ID NO: 183629 - DNA, 15 bp, Homo sapiens
gcatgaggccgacca

SEQ ID NO: 183630 - DNA, 15 bp, Homo sapiens
catgaggccgaccac

SEQ ID NO: 183631 - DNA, 15 bp, Homo sapiens
atgaggccgaccact

SEQ ID NO: 183632 - DNA, 15 bp, Homo sapiens
tgaggccgaccactc

SEQ ID NO: 183633 - DNA, 15 bp, Homo sapiens
gaggccgaccactcc

SEQ ID NO: 183634 - DNA, 15 bp, Homo sapiens
aggccgaccactccc

SEQ ID NO: 183635 - DNA, 15 bp, Homo sapiens
ggccgaccactccct

SEQ ID NO: 183636 - DNA, 15 bp, Homo sapiens
gccgaccactccctg

SEQ ID NO: 183637 - DNA, 15 bp, Homo sapiens
ccgaccactccctga

SEQ ID NO: 183638 - DNA, 15 bp, Homo sapiens
cgaccactccctgat

SEQ ID NO: 183639 - DNA, 15 bp, Homo sapiens
gaccactccctgatc

SEQ ID NO: 183640 - DNA, 15 bp, Homo sapiens
accactccctgatct

SEQ ID NO: 183641 - DNA, 15 bp, Homo sapiens
ccactccctgatctg

SEQ ID NO: 183642 - DNA, 15 bp, Homo sapiens
cactccctgatctgg

SEQ ID NO: 183643 - DNA, 15 bp, Homo sapiens
actccctgatctggt

SEQ ID NO: 183644 - DNA, 15 bp, Homo sapiens
ctccctgatctggta

SEQ ID NO: 183645 - DNA, 15 bp, Homo sapiens
tccctgatctggtaa

SEQ ID NO: 183646 - DNA, 15 bp, Homo sapiens
ccctgatctggtaaa

SEQ ID NO: 183647 - DNA, 15 bp, Homo sapiens
cctgatctggtaaac

SEQ ID NO: 183648 - DNA, 15 bp, Homo sapiens
ctgatctggtaaaca

SEQ ID NO: 183649 - DNA, 15 bp, Homo sapiens
tgatctggtaaacag

SEQ ID NO: 183650 - DNA, 15 bp, Homo sapiens
gatctggtaaacaga

SEQ ID NO: 183651 - DNA, 15 bp, Homo sapiens
atctggtaaacagag

SEQ ID NO: 183652 - DNA, 15 bp, Homo sapiens
tctggtaaacagaga

SEQ ID NO: 183653 - DNA, 15 bp, Homo sapiens
ctggtaaacagagat

SEQ ID NO: 183654 - DNA, 15 bp, Homo sapiens
tggtaaacagagatg

SEQ ID NO: 183655 - DNA, 15 bp, Homo sapiens
ggtaaacagagatgt

SEQ ID NO: 183656 - DNA, 15 bp, Homo sapiens
gtaaacagagatgtc

SEQ ID NO: 183657 - DNA, 15 bp, Homo sapiens
taaacagagatgtca

SEQ ID NO: 183658 - DNA, 15 bp, Homo sapiens
aaacagagatgtcag

SEQ ID NO: 183659 - DNA, 15 bp, Homo sapiens
aacagagatgtcagc

SEQ ID NO: 183660 - DNA, 15 bp, Homo sapiens
acagagatgtcagcc

SEQ ID NO: 183661 - DNA, 15 bp, Homo sapiens
cagagatgtcagcct

SEQ ID NO: 183662 - DNA, 15 bp, Homo sapiens
agagatgtcagcctg

SEQ ID NO: 183663 - DNA, 15 bp, Homo sapiens
gagatgtcagcctgg

SEQ ID NO: 183664 - DNA, 15 bp, Homo sapiens
agatgtcagcctggt

SEQ ID NO: 183665 - DNA, 15 bp, Homo sapiens
gatgtcagcctggtt

SEQ ID NO: 183666 - DNA, 15 bp, Homo sapiens
atgtcagcctggttt

SEQ ID NO: 183667 - DNA, 15 bp, Homo sapiens
tgtcagcctggtttc

SEQ ID NO: 183668 - DNA, 15 bp, Homo sapiens
gtcagcctggtttct

SEQ ID NO: 183669 - DNA, 15 bp, Homo sapiens
tcagcctggtttcta

SEQ ID NO: 183670 - DNA, 15 bp, Homo sapiens
cagcctggtttctag

SEQ ID NO: 183671 - DNA, 15 bp, Homo sapiens
agcctggtttctagt

SEQ ID NO: 183672 - DNA, 15 bp, Homo sapiens
gcctggtttctagtg

SEQ ID NO: 183673 - DNA, 15 bp, Homo sapiens
cctggtttctagtgt

SEQ ID NO: 183674 - DNA, 15 bp, Homo sapiens
ctggtttctagtgtt

SEQ ID NO: 183675 - DNA, 15 bp, Homo sapiens
tggtttctagtgtta

SEQ ID NO: 183676 - DNA, 15 bp, Homo sapiens
ggtttctagtgttag

SEQ ID NO: 183677 - DNA, 15 bp, Homo sapiens
gtttctagtgttagg

SEQ ID NO: 183678 - DNA, 15 bp, Homo sapiens
tttctagtgttaggg

SEQ ID NO: 183679 - DNA, 15 bp, Homo sapiens
ttctagtgttaggga

SEQ ID NO: 183680 - DNA, 15 bp, Homo sapiens
tctagtgttagggag

SEQ ID NO: 183681 - DNA, 15 bp, Homo sapiens
ctagtgttagggagt

SEQ ID NO: 183682 - DNA, 15 bp, Homo sapiens
tagtgttagggagtt

SEQ ID NO: 183683 - DNA, 15 bp, Homo sapiens
agtgttagggagttt

SEQ ID NO: 183684 - DNA, 15 bp, Homo sapiens
gtgttagggagtttc

SEQ ID NO: 183685 - DNA, 15 bp, Homo sapiens
tgttagggagtttcc

SEQ ID NO: 183686 - DNA, 15 bp, Homo sapiens
gttagggagtttcct

SEQ ID NO: 183687 - DNA, 15 bp, Homo sapiens
ttagggagtttcctg

SEQ ID NO: 183688 - DNA, 15 bp, Homo sapiens
tagggagtttcctgg

SEQ ID NO: 183689 - DNA, 15 bp, Homo sapiens
agggagtttcctgga

SEQ ID NO: 183690 - DNA, 15 bp, Homo sapiens
gggagtttcctggag

SEQ ID NO: 183691 - DNA, 15 bp, Homo sapiens
ggagtttcctggagt

SEQ ID NO: 183692 - DNA, 15 bp, Homo sapiens
gagtttcctggagtg

SEQ ID NO: 183693 - DNA, 15 bp, Homo sapiens
agtttcctggagtga

SEQ ID NO: 183694 - DNA, 15 bp, Homo sapiens
gtttcctggagtgat

SEQ ID NO: 183695 - DNA, 15 bp, Homo sapiens
tttcctggagtgatg

SEQ ID NO: 183696 - DNA, 15 bp, Homo sapiens
ttcctggagtgatgg

SEQ ID NO: 183697 - DNA, 15 bp, Homo sapiens
tcctggagtgatggt

SEQ ID NO: 183698 - DNA, 15 bp, Homo sapiens
cctggagtgatggta

SEQ ID NO: 183699 - DNA, 15 bp, Homo sapiens
ctggagtgatggtac

SEQ ID NO: 183700 - DNA, 15 bp, Homo sapiens
tggagtgatggtaca

SEQ ID NO: 183701 - DNA, 15 bp, Homo sapiens
ggagtgatggtacag

SEQ ID NO: 183702 - DNA, 15 bp, Homo sapiens
gagtgatggtacagg

SEQ ID NO: 183703 - DNA, 15 bp, Homo sapiens
agtgatggtacaggg

SEQ ID NO: 183704 - DNA, 15 bp, Homo sapiens
gtgatggtacagggt

SEQ ID NO: 183705 - DNA, 15 bp, Homo sapiens
tgatggtacagggta

SEQ ID NO: 183706 - DNA, 15 bp, Homo sapiens
gatggtacagggtac

SEQ ID NO: 183707 - DNA, 15 bp, Homo sapiens
atggtacagggtaca

SEQ ID NO: 183708 - DNA, 15 bp, Homo sapiens
tggtacagggtacat

SEQ ID NO: 183709 - DNA, 15 bp, Homo sapiens
ggtacagggtacatt

SEQ ID NO: 183710 - DNA, 15 bp, Homo sapiens
gtacagggtacattt

SEQ ID NO: 183711 - DNA, 15 bp, Homo sapiens
tacagggtacatttc

SEQ ID NO: 183712 - DNA, 15 bp, Homo sapiens
acagggtacatttct

SEQ ID NO: 183713 - DNA, 15 bp, Homo sapiens
cagggtacatttctg

SEQ ID NO: 183714 - DNA, 15 bp, Homo sapiens
agggtacatttctgc

SEQ ID NO: 183715 - DNA, 15 bp, Homo sapiens
gggtacatttctgcc

SEQ ID NO: 183716 - DNA, 15 bp, Homo sapiens
ggtacatttctgccc

SEQ ID NO: 183717 - DNA, 15 bp, Homo sapiens
gtacatttctgccct

SEQ ID NO: 183718 - DNA, 15 bp, Homo sapiens
tacatttctgccctg

SEQ ID NO: 183719 - DNA, 15 bp, Homo sapiens
acatttctgccctgc

SEQ ID NO: 183720 - DNA, 15 bp, Homo sapiens
catttctgccctgca

SEQ ID NO: 183721 - DNA, 15 bp, Homo sapiens
atttctgccctgcat

SEQ ID NO: 183722 - DNA, 15 bp, Homo sapiens
tttctgccctgcatc

SEQ ID NO: 183723 - DNA, 15 bp, Homo sapiens
ttctgccctgcatcc

SEQ ID NO: 183724 - DNA, 15 bp, Homo sapiens
tctgccctgcatccc

SEQ ID NO: 183725 - DNA, 15 bp, Homo sapiens
ctgccctgcatccca

SEQ ID NO: 183726 - DNA, 15 bp, Homo sapiens
tgccctgcatcccaa

SEQ ID NO: 183727 - DNA, 15 bp, Homo sapiens
gccctgcatcccaag

SEQ ID NO: 183728 - DNA, 15 bp, Homo sapiens
ccctgcatcccaagt

SEQ ID NO: 183729 - DNA, 15 bp, Homo sapiens
cctgcatcccaagtc

SEQ ID NO: 183730 - DNA, 15 bp, Homo sapiens
ctgcatcccaagtcc

SEQ ID NO: 183731 - DNA, 15 bp, Homo sapiens
tgcatcccaagtcca

SEQ ID NO: 183732 - DNA, 15 bp, Homo sapiens
gcatcccaagtccag

SEQ ID NO: 183733 - DNA, 15 bp, Homo sapiens
catcccaagtccaga

SEQ ID NO: 183734 - DNA, 15 bp, Homo sapiens
atcccaagtccagag

SEQ ID NO: 183735 - DNA, 15 bp, Homo sapiens
tcccaagtccagaga

SEQ ID NO: 183736 - DNA, 15 bp, Homo sapiens
cccaagtccagagac

SEQ ID NO: 183737 - DNA, 15 bp, Homo sapiens
ccaagtccagagact

SEQ ID NO: 183738 - DNA, 15 bp, Homo sapiens
caagtccagagactg

SEQ ID NO: 183739 - DNA, 15 bp, Homo sapiens
aagtccagagactgg

SEQ ID NO: 183740 - DNA, 15 bp, Homo sapiens
agtccagagactggg

SEQ ID NO: 183741 - DNA, 15 bp, Homo sapiens
gtccagagactgggt

SEQ ID NO: 183742 - DNA, 15 bp, Homo sapiens
tccagagactgggtt

SEQ ID NO: 183743 - DNA, 15 bp, Homo sapiens
ccagagactgggttc

SEQ ID NO: 183744 - DNA, 15 bp, Homo sapiens
cagagactgggttct

SEQ ID NO: 183745 - DNA, 15 bp, Homo sapiens
agagactgggttcta

SEQ ID NO: 183746 - DNA, 15 bp, Homo sapiens
gagactgggttctag

SEQ ID NO: 183747 - DNA, 15 bp, Homo sapiens
agactgggttctagg

SEQ ID NO: 183748 - DNA, 15 bp, Homo sapiens
gactgggttctaggt

SEQ ID NO: 183749 - DNA, 15 bp, Homo sapiens
actgggttctaggtc

SEQ ID NO: 183750 - DNA, 15 bp, Homo sapiens
ctgggttctaggtcc

SEQ ID NO: 183751 - DNA, 15 bp, Homo sapiens
tgggttctaggtcca

SEQ ID NO: 183752 - DNA, 15 bp, Homo sapiens
gggttctaggtccag

SEQ ID NO: 183753 - DNA, 15 bp, Homo sapiens
ggttctaggtccagc

SEQ ID NO: 183754 - DNA, 15 bp, Homo sapiens
gttctaggtccagcc

SEQ ID NO: 183755 - DNA, 15 bp, Homo sapiens
ttctaggtccagcct

SEQ ID NO: 183756 - DNA, 15 bp, Homo sapiens
tctaggtccagcctt

SEQ ID NO: 183757 - DNA, 15 bp, Homo sapiens
ctaggtccagccttt

SEQ ID NO: 183758 - DNA, 15 bp, Homo sapiens
taggtccagcctttc

SEQ ID NO: 183759 - DNA, 15 bp, Homo sapiens
aggtccagcctttct

SEQ ID NO: 183760 - DNA, 15 bp, Homo sapiens
ggtccagcctttctt

SEQ ID NO: 183761 - DNA, 15 bp, Homo sapiens
gtccagcctttcttc

SEQ ID NO: 183762 - DNA, 15 bp, Homo sapiens
tccagcctttcttct

SEQ ID NO: 183763 - DNA, 15 bp, Homo sapiens
ccagcctttcttcta

SEQ ID NO: 183764 - DNA, 15 bp, Homo sapiens
cagcctttcttctaa

SEQ ID NO: 183765 - DNA, 15 bp, Homo sapiens
agcctttcttctaac

SEQ ID NO: 183766 - DNA, 15 bp, Homo sapiens
gcctttcttctaact

SEQ ID NO: 183767 - DNA, 15 bp, Homo sapiens
cctttcttctaactc

SEQ ID NO: 183768 - DNA, 15 bp, Homo sapiens
ctttcttctaactcc

SEQ ID NO: 183769 - DNA, 15 bp, Homo sapiens
tttcttctaactccc

SEQ ID NO: 183770 - DNA, 15 bp, Homo sapiens
ttcttctaactccct

SEQ ID NO: 183771 - DNA, 15 bp, Homo sapiens
tcttctaactccctg

SEQ ID NO: 183772 - DNA, 15 bp, Homo sapiens
cttctaactccctga

SEQ ID NO: 183773 - DNA, 15 bp, Homo sapiens
ttctaactccctgag

SEQ ID NO: 183774 - DNA, 15 bp, Homo sapiens
tctaactccctgaga

SEQ ID NO: 183775 - DNA, 15 bp, Homo sapiens
ctaactccctgagag

SEQ ID NO: 183776 - DNA, 15 bp, Homo sapiens
taactccctgagaga

SEQ ID NO: 183777 - DNA, 15 bp, Homo sapiens
aactccctgagagat

SEQ ID NO: 183778 - DNA, 15 bp, Homo sapiens
actccctgagagatg

SEQ ID NO: 183779 - DNA, 15 bp, Homo sapiens
ctccctgagagatga

SEQ ID NO: 183780 - DNA, 15 bp, Homo sapiens
tccctgagagatgac

SEQ ID NO: 183781 - DNA, 15 bp, Homo sapiens
ccctgagagatgaca

SEQ ID NO: 183782 - DNA, 15 bp, Homo sapiens
cctgagagatgacag

SEQ ID NO: 183783 - DNA, 15 bp, Homo sapiens
ctgagagatgacagc

SEQ ID NO: 183784 - DNA, 15 bp, Homo sapiens
tgagagatgacagcc

SEQ ID NO: 183785 - DNA, 15 bp, Homo sapiens
gagagatgacagcct

SEQ ID NO: 183786 - DNA, 15 bp, Homo sapiens
agagatgacagcctc

SEQ ID NO: 183787 - DNA, 15 bp, Homo sapiens
gagatgacagcctct

SEQ ID NO: 183788 - DNA, 15 bp, Homo sapiens
agatgacagcctctg

SEQ ID NO: 183789 - DNA, 15 bp, Homo sapiens
gatgacagcctctgg

SEQ ID NO: 183790 - DNA, 15 bp, Homo sapiens
atgacagcctctggg

SEQ ID NO: 183791 - DNA, 15 bp, Homo sapiens
tgacagcctctgggc

SEQ ID NO: 183792 - DNA, 15 bp, Homo sapiens
gacagcctctgggca

SEQ ID NO: 183793 - DNA, 15 bp, Homo sapiens
acagcctctgggcaa

SEQ ID NO: 183794 - DNA, 15 bp, Homo sapiens
cagcctctgggcaaa

SEQ ID NO: 183795 - DNA, 15 bp, Homo sapiens
agcctctgggcaaag

SEQ ID NO: 183796 - DNA, 15 bp, Homo sapiens
gcctctgggcaaagt

SEQ ID NO: 183797 - DNA, 15 bp, Homo sapiens
cctctgggcaaagtc

SEQ ID NO: 183798 - DNA, 15 bp, Homo sapiens
ctctgggcaaagtcc

SEQ ID NO: 183799 - DNA, 15 bp, Homo sapiens
tctgggcaaagtccc

SEQ ID NO: 183800 - DNA, 15 bp, Homo sapiens
ctgggcaaagtccct

SEQ ID NO: 183801 - DNA, 15 bp, Homo sapiens
tgggcaaagtccctc

SEQ ID NO: 183802 - DNA, 15 bp, Homo sapiens
gggcaaagtccctct

SEQ ID NO: 183803 - DNA, 15 bp, Homo sapiens
ggcaaagtccctctg

SEQ ID NO: 183804 - DNA, 15 bp, Homo sapiens
gcaaagtccctctgt

SEQ ID NO: 183805 - DNA, 15 bp, Homo sapiens
caaagtccctctgtg

SEQ ID NO: 183806 - DNA, 15 bp, Homo sapiens
aaagtccctctgtgc

SEQ ID NO: 183807 - DNA, 15 bp, Homo sapiens
aagtccctctgtgct

SEQ ID NO: 183808 - DNA, 15 bp, Homo sapiens
agtccctctgtgctc

SEQ ID NO: 183809 - DNA, 15 bp, Homo sapiens
gtccctctgtgctct

SEQ ID NO: 183810 - DNA, 15 bp, Homo sapiens
tccctctgtgctctt

SEQ ID NO: 183811 - DNA, 15 bp, Homo sapiens
ccctctgtgctcttc

SEQ ID NO: 183812 - DNA, 15 bp, Homo sapiens
cctctgtgctcttca

SEQ ID NO: 183813 - DNA, 15 bp, Homo sapiens
ctctgtgctcttcag

SEQ ID NO: 183814 - DNA, 15 bp, Homo sapiens
tctgtgctcttcagt

SEQ ID NO: 183815 - DNA, 15 bp, Homo sapiens
ctgtgctcttcagtc

SEQ ID NO: 183816 - DNA, 15 bp, Homo sapiens
tgtgctcttcagtct

SEQ ID NO: 183817 - DNA, 15 bp, Homo sapiens
gtgctcttcagtctc

SEQ ID NO: 183818 - DNA, 15 bp, Homo sapiens
tgctcttcagtctct

SEQ ID NO: 183819 - DNA, 15 bp, Homo sapiens
gctcttcagtctctt

SEQ ID NO: 183820 - DNA, 15 bp, Homo sapiens
ctcttcagtctcttc

SEQ ID NO: 183821 - DNA, 15 bp, Homo sapiens
tcttcagtctcttca

SEQ ID NO: 183822 - DNA, 15 bp, Homo sapiens
cttcagtctcttcat

SEQ ID NO: 183823 - DNA, 15 bp, Homo sapiens
ttcagtctcttcatc

SEQ ID NO: 183824 - DNA, 15 bp, Homo sapiens
tcagtctcttcatct

SEQ ID NO: 183825 - DNA, 15 bp, Homo sapiens
cagtctcttcatctg

SEQ ID NO: 183826 - DNA, 15 bp, Homo sapiens
agtctcttcatctgt

SEQ ID NO: 183827 - DNA, 15 bp, Homo sapiens
gtctcttcatctgtg

SEQ ID NO: 183828 - DNA, 15 bp, Homo sapiens
tctcttcatctgtga

SEQ ID NO: 183829 - DNA, 15 bp, Homo sapiens
ctcttcatctgtgag

SEQ ID NO: 183830 - DNA, 15 bp, Homo sapiens
tcttcatctgtgaga

SEQ ID NO: 183831 - DNA, 15 bp, Homo sapiens
cttcatctgtgagat

SEQ ID NO: 183832 - DNA, 15 bp, Homo sapiens
ttcatctgtgagatg

SEQ ID NO: 183833 - DNA, 15 bp, Homo sapiens
tcatctgtgagatgg

SEQ ID NO: 183834 - DNA, 15 bp, Homo sapiens
catctgtgagatggt

SEQ ID NO: 183835 - DNA, 15 bp, Homo sapiens
atctgtgagatggtg

SEQ ID NO: 183836 - DNA, 15 bp, Homo sapiens
tctgtgagatggtgg

SEQ ID NO: 183837 - DNA, 15 bp, Homo sapiens
ctgtgagatggtggc

SEQ ID NO: 183838 - DNA, 15 bp, Homo sapiens
tgtgagatggtggca

SEQ ID NO: 183839 - DNA, 15 bp, Homo sapiens
gtgagatggtggcat

SEQ ID NO: 183840 - DNA, 15 bp, Homo sapiens
tgagatggtggcatg

SEQ ID NO: 183841 - DNA, 15 bp, Homo sapiens
gagatggtggcatgg

SEQ ID NO: 183842 - DNA, 15 bp, Homo sapiens
agatggtggcatggg

SEQ ID NO: 183843 - DNA, 15 bp, Homo sapiens
gatggtggcatgggg

SEQ ID NO: 183844 - DNA, 15 bp, Homo sapiens
atggtggcatgggga

SEQ ID NO: 183845 - DNA, 15 bp, Homo sapiens
tggtggcatggggag

SEQ ID NO: 183846 - DNA, 15 bp, Homo sapiens
ggtggcatggggaga

SEQ ID NO: 183847 - DNA, 15 bp, Homo sapiens
gtggcatggggagag

SEQ ID NO: 183848 - DNA, 15 bp, Homo sapiens
tggcatggggagagg

SEQ ID NO: 183849 - DNA, 15 bp, Homo sapiens
ggcatggggagaggc

SEQ ID NO: 183850 - DNA, 15 bp, Homo sapiens
gcatggggagaggct

SEQ ID NO: 183851 - DNA, 15 bp, Homo sapiens
catggggagaggctg

SEQ ID NO: 183852 - DNA, 15 bp, Homo sapiens
atggggagaggctgg

SEQ ID NO: 183853 - DNA, 15 bp, Homo sapiens
tggggagaggctgga

SEQ ID NO: 183854 - DNA, 15 bp, Homo sapiens
ggggagaggctggag

SEQ ID NO: 183855 - DNA, 15 bp, Homo sapiens
gggagaggctggagt

SEQ ID NO: 183856 - DNA, 15 bp, Homo sapiens
ggagaggctggagtg

SEQ ID NO: 183857 - DNA, 15 bp, Homo sapiens
gagaggctggagtga

SEQ ID NO: 183858 - DNA, 15 bp, Homo sapiens
agaggctggagtgat

SEQ ID NO: 183859 - DNA, 15 bp, Homo sapiens
gaggctggagtgatg

SEQ ID NO: 183860 - DNA, 15 bp, Homo sapiens
aggctggagtgatgt

SEQ ID NO: 183861 - DNA, 15 bp, Homo sapiens
ggctggagtgatgtc

SEQ ID NO: 183862 - DNA, 15 bp, Homo sapiens
gctggagtgatgtca

SEQ ID NO: 183863 - DNA, 15 bp, Homo sapiens
ctggagtgatgtcac

SEQ ID NO: 183864 - DNA, 15 bp, Homo sapiens
tggagtgatgtcaca

SEQ ID NO: 183865 - DNA, 15 bp, Homo sapiens
ggagtgatgtcacag

SEQ ID NO: 183866 - DNA, 15 bp, Homo sapiens
gagtgatgtcacagt

SEQ ID NO: 183867 - DNA, 15 bp, Homo sapiens
agtgatgtcacagtt

SEQ ID NO: 183868 - DNA, 15 bp, Homo sapiens
gtgatgtcacagttc

SEQ ID NO: 183869 - DNA, 15 bp, Homo sapiens
tgatgtcacagttcc

SEQ ID NO: 183870 - DNA, 15 bp, Homo sapiens
gatgtcacagttcct

SEQ ID NO: 183871 - DNA, 15 bp, Homo sapiens
atgtcacagttcctc

SEQ ID NO: 183872 - DNA, 15 bp, Homo sapiens
tgtcacagttcctct

SEQ ID NO: 183873 - DNA, 15 bp, Homo sapiens
gtcacagttcctctc

SEQ ID NO: 183874 - DNA, 15 bp, Homo sapiens
tcacagttcctctca

SEQ ID NO: 183875 - DNA, 15 bp, Homo sapiens
cacagttcctctcag

SEQ ID NO: 183876 - DNA, 15 bp, Homo sapiens
acagttcctctcagc

SEQ ID NO: 183877 - DNA, 15 bp, Homo sapiens
cagttcctctcagcc

SEQ ID NO: 183878 - DNA, 15 bp, Homo sapiens
agttcctctcagcct

SEQ ID NO: 183879 - DNA, 15 bp, Homo sapiens
gttcctctcagcctg

SEQ ID NO: 183880 - DNA, 15 bp, Homo sapiens
ttcctctcagcctgc

SEQ ID NO: 183881 - DNA, 15 bp, Homo sapiens
tcctctcagcctgca

SEQ ID NO: 183882 - DNA, 15 bp, Homo sapiens
cctctcagcctgcat

SEQ ID NO: 183883 - DNA, 15 bp, Homo sapiens
ctctcagcctgcatc

SEQ ID NO: 183884 - DNA, 15 bp, Homo sapiens
tctcagcctgcatca

SEQ ID NO: 183885 - DNA, 15 bp, Homo sapiens
ctcagcctgcatcac

SEQ ID NO: 183886 - DNA, 15 bp, Homo sapiens
tcagcctgcatcaca

SEQ ID NO: 183887 - DNA, 15 bp, Homo sapiens
cagcctgcatcacag

SEQ ID NO: 183888 - DNA, 15 bp, Homo sapiens
agcctgcatcacagg

SEQ ID NO: 183889 - DNA, 15 bp, Homo sapiens
gcctgcatcacaggc

SEQ ID NO: 183890 - DNA, 15 bp, Homo sapiens
cctgcatcacaggct

SEQ ID NO: 183891 - DNA, 15 bp, Homo sapiens
ctgcatcacaggctc

SEQ ID NO: 183892 - DNA, 15 bp, Homo sapiens
tgcatcacaggctct

SEQ ID NO: 183893 - DNA, 15 bp, Homo sapiens
gcatcacaggctcta

SEQ ID NO: 183894 - DNA, 15 bp, Homo sapiens
catcacaggctctag

SEQ ID NO: 183895 - DNA, 15 bp, Homo sapiens
atcacaggctctagg

SEQ ID NO: 183896 - DNA, 15 bp, Homo sapiens
tcacaggctctagga

SEQ ID NO: 183897 - DNA, 15 bp, Homo sapiens
cacaggctctaggac

SEQ ID NO: 183898 - DNA, 15 bp, Homo sapiens
acaggctctaggact

SEQ ID NO: 183899 - DNA, 15 bp, Homo sapiens
caggctctaggactc

SEQ ID NO: 183900 - DNA, 15 bp, Homo sapiens
aggctctaggactca

SEQ ID NO: 183901 - DNA, 15 bp, Homo sapiens
ggctctaggactcag

SEQ ID NO: 183902 - DNA, 15 bp, Homo sapiens
gctctaggactcagg

SEQ ID NO: 183903 - DNA, 15 bp, Homo sapiens
ctctaggactcaggt

SEQ ID NO: 183904 - DNA, 15 bp, Homo sapiens
tctaggactcaggtc

SEQ ID NO: 183905 - DNA, 15 bp, Homo sapiens
ctaggactcaggtcc

SEQ ID NO: 183906 - DNA, 15 bp, Homo sapiens
taggactcaggtcct

SEQ ID NO: 183907 - DNA, 15 bp, Homo sapiens
aggactcaggtccta

SEQ ID NO: 183908 - DNA, 15 bp, Homo sapiens
ggactcaggtcctat

SEQ ID NO: 183909 - DNA, 15 bp, Homo sapiens
gactcaggtcctatc

SEQ ID NO: 183910 - DNA, 15 bp, Homo sapiens
actcaggtcctatca

SEQ ID NO: 183911 - DNA, 15 bp, Homo sapiens
ctcaggtcctatcag

SEQ ID NO: 183912 - DNA, 15 bp, Homo sapiens
tcaggtcctatcagt

SEQ ID NO: 183913 - DNA, 15 bp, Homo sapiens
caggtcctatcagta

SEQ ID NO: 183914 - DNA, 15 bp, Homo sapiens
aggtcctatcagtaa

SEQ ID NO: 183915 - DNA, 15 bp, Homo sapiens
ggtcctatcagtaac

SEQ ID NO: 183916 - DNA, 15 bp, Homo sapiens
gtcctatcagtaacc

SEQ ID NO: 183917 - DNA, 15 bp, Homo sapiens
tcctatcagtaacct

SEQ ID NO: 183918 - DNA, 15 bp, Homo sapiens
cctatcagtaacctg

SEQ ID NO: 183919 - DNA, 15 bp, Homo sapiens
ctatcagtaacctgc

SEQ ID NO: 183920 - DNA, 15 bp, Homo sapiens
tatcagtaacctgct

SEQ ID NO: 183921 - DNA, 15 bp, Homo sapiens
atcagtaacctgctg

SEQ ID NO: 183922 - DNA, 15 bp, Homo sapiens
tcagtaacctgctgg

SEQ ID NO: 183923 - DNA, 15 bp, Homo sapiens
cagtaacctgctggg

SEQ ID NO: 183924 - DNA, 15 bp, Homo sapiens
agtaacctgctgggg

SEQ ID NO: 183925 - DNA, 15 bp, Homo sapiens
gtaacctgctggggg

SEQ ID NO: 183926 - DNA, 15 bp, Homo sapiens
taacctgctggggga

SEQ ID NO: 183927 - DNA, 15 bp, Homo sapiens
aacctgctgggggag

SEQ ID NO: 183928 - DNA, 15 bp, Homo sapiens
acctgctgggggagg

SEQ ID NO: 183929 - DNA, 15 bp, Homo sapiens
cctgctgggggaggt

SEQ ID NO: 183930 - DNA, 15 bp, Homo sapiens
ctgctgggggaggtc

SEQ ID NO: 183931 - DNA, 15 bp, Homo sapiens
tgctgggggaggtct

SEQ ID NO: 183932 - DNA, 15 bp, Homo sapiens
gctgggggaggtctg

SEQ ID NO: 183933 - DNA, 15 bp, Homo sapiens
ctgggggaggtctgg

SEQ ID NO: 183934 - DNA, 15 bp, Homo sapiens
tgggggaggtctggg

SEQ ID NO: 183935 - DNA, 15 bp, Homo sapiens
gggggaggtctgggc

SEQ ID NO: 183936 - DNA, 15 bp, Homo sapiens
ggggaggtctgggcc

SEQ ID NO: 183937 - DNA, 15 bp, Homo sapiens
gggaggtctgggcct

SEQ ID NO: 183938 - DNA, 15 bp, Homo sapiens
ggaggtctgggcctt

SEQ ID NO: 183939 - DNA, 15 bp, Homo sapiens
gaggtctgggccttc

SEQ ID NO: 183940 - DNA, 15 bp, Homo sapiens
aggtctgggccttcc

SEQ ID NO: 183941 - DNA, 15 bp, Homo sapiens
ggtctgggccttcca

SEQ ID NO: 183942 - DNA, 15 bp, Homo sapiens
gtctgggccttccag

SEQ ID NO: 183943 - DNA, 15 bp, Homo sapiens
tctgggccttccagg

SEQ ID NO: 183944 - DNA, 15 bp, Homo sapiens
ctgggccttccagga

SEQ ID NO: 183945 - DNA, 15 bp, Homo sapiens
tgggccttccaggag

SEQ ID NO: 183946 - DNA, 15 bp, Homo sapiens
gggccttccaggaga

SEQ ID NO: 183947 - DNA, 15 bp, Homo sapiens
ggccttccaggagaa

SEQ ID NO: 183948 - DNA, 15 bp, Homo sapiens
gccttccaggagaaa

SEQ ID NO: 183949 - DNA, 15 bp, Homo sapiens
ccttccaggagaaac

SEQ ID NO: 183950 - DNA, 15 bp, Homo sapiens
cttccaggagaaacc

SEQ ID NO: 183951 - DNA, 15 bp, Homo sapiens
ttccaggagaaacct

SEQ ID NO: 183952 - DNA, 15 bp, Homo sapiens
tccaggagaaacctg

SEQ ID NO: 183953 - DNA, 15 bp, Homo sapiens
ccaggagaaacctga

SEQ ID NO: 183954 - DNA, 15 bp, Homo sapiens
caggagaaacctgac

SEQ ID NO: 183955 - DNA, 15 bp, Homo sapiens
aggagaaacctgaca

SEQ ID NO: 183956 - DNA, 15 bp, Homo sapiens
ggagaaacctgacaa

SEQ ID NO: 183957 - DNA, 15 bp, Homo sapiens
gagaaacctgacaag

SEQ ID NO: 183958 - DNA, 15 bp, Homo sapiens
agaaacctgacaaga

SEQ ID NO: 183959 - DNA, 15 bp, Homo sapiens
gaaacctgacaagat

SEQ ID NO: 183960 - DNA, 15 bp, Homo sapiens
aaacctgacaagatg

SEQ ID NO: 183961 - DNA, 15 bp, Homo sapiens
aacctgacaagatgg

SEQ ID NO: 183962 - DNA, 15 bp, Homo sapiens
acctgacaagatggt

SEQ ID NO: 183963 - DNA, 15 bp, Homo sapiens
cctgacaagatggtg

SEQ ID NO: 183964 - DNA, 15 bp, Homo sapiens
ctgacaagatggtgc

SEQ ID NO: 183965 - DNA, 15 bp, Homo sapiens
tgacaagatggtgct

SEQ ID NO: 183966 - DNA, 15 bp, Homo sapiens
gacaagatggtgctg

SEQ ID NO: 183967 - DNA, 15 bp, Homo sapiens
acaagatggtgctgc

SEQ ID NO: 183968 - DNA, 15 bp, Homo sapiens
caagatggtgctgca

SEQ ID NO: 183969 - DNA, 15 bp, Homo sapiens
aagatggtgctgcaa

SEQ ID NO: 183970 - DNA, 15 bp, Homo sapiens
agatggtgctgcaaa

SEQ ID NO: 183971 - DNA, 15 bp, Homo sapiens
gatggtgctgcaaac

SEQ ID NO: 183972 - DNA, 15 bp, Homo sapiens
atggtgctgcaaaca

SEQ ID NO: 183973 - DNA, 15 bp, Homo sapiens
tggtgctgcaaacac

SEQ ID NO: 183974 - DNA, 15 bp, Homo sapiens
ggtgctgcaaacacc

SEQ ID NO: 183975 - DNA, 15 bp, Homo sapiens
gtgctgcaaacacca

SEQ ID NO: 183976 - DNA, 15 bp, Homo sapiens
tgctgcaaacaccaa

SEQ ID NO: 183977 - DNA, 15 bp, Homo sapiens
gctgcaaacaccaac

SEQ ID NO: 183978 - DNA, 15 bp, Homo sapiens
ctgcaaacaccaacg

SEQ ID NO: 183979 - DNA, 15 bp, Homo sapiens
tgcaaacaccaacgg

SEQ ID NO: 183980 - DNA, 15 bp, Homo sapiens
gcaaacaccaacgga

SEQ ID NO: 183981 - DNA, 15 bp, Homo sapiens
caaacaccaacggac

SEQ ID NO: 183982 - DNA, 15 bp, Homo sapiens
aaacaccaacggaca

SEQ ID NO: 183983 - DNA, 15 bp, Homo sapiens
aacaccaacggacac

SEQ ID NO: 183984 - DNA, 15 bp, Homo sapiens
acaccaacggacaca

SEQ ID NO: 183985 - DNA, 15 bp, Homo sapiens
caccaacggacacac

SEQ ID NO: 183986 - DNA, 15 bp, Homo sapiens
accaacggacacaca

SEQ ID NO: 183987 - DNA, 15 bp, Homo sapiens
ccaacggacacacag

SEQ ID NO: 183988 - DNA, 15 bp, Homo sapiens
caacggacacacagc

SEQ ID NO: 183989 - DNA, 15 bp, Homo sapiens
aacggacacacagca

SEQ ID NO: 183990 - DNA, 15 bp, Homo sapiens
acggacacacagcac

SEQ ID NO: 183991 - DNA, 15 bp, Homo sapiens
cggacacacagcact

SEQ ID NO: 183992 - DNA, 15 bp, Homo sapiens
ggacacacagcactt

SEQ ID NO: 183993 - DNA, 15 bp, Homo sapiens
gacacacagcacttt

SEQ ID NO: 183994 - DNA, 15 bp, Homo sapiens
acacacagcacttta

SEQ ID NO: 183995 - DNA, 15 bp, Homo sapiens
cacacagcactttac

SEQ ID NO: 183996 - DNA, 15 bp, Homo sapiens
acacagcactttaca

SEQ ID NO: 183997 - DNA, 15 bp, Homo sapiens
cacagcactttacat

SEQ ID NO: 183998 - DNA, 15 bp, Homo sapiens
acagcactttacatt

SEQ ID NO: 183999 - DNA, 15 bp, Homo sapiens
cagcactttacattc

SEQ ID NO: 184000 - DNA, 15 bp, Homo sapiens
agcactttacattca

SEQ ID NO: 184001 - DNA, 15 bp, Homo sapiens
gcactttacattcac

SEQ ID NO: 184002 - DNA, 15 bp, Homo sapiens
cactttacattcaca

SEQ ID NO: 184003 - DNA, 15 bp, Homo sapiens
actttacattcacag

SEQ ID NO: 184004 - DNA, 15 bp, Homo sapiens
ctttacattcacagg

SEQ ID NO: 184005 - DNA, 15 bp, Homo sapiens
tttacattcacaggc

SEQ ID NO: 184006 - DNA, 15 bp, Homo sapiens
ttacattcacaggct

SEQ ID NO: 184007 - DNA, 15 bp, Homo sapiens
tacattcacaggctg

SEQ ID NO: 184008 - DNA, 15 bp, Homo sapiens
acattcacaggctgt

SEQ ID NO: 184009 - DNA, 15 bp, Homo sapiens
cattcacaggctgtc

SEQ ID NO: 184010 - DNA, 15 bp, Homo sapiens
attcacaggctgtct

SEQ ID NO: 184011 - DNA, 15 bp, Homo sapiens
ttcacaggctgtctc

SEQ ID NO: 184012 - DNA, 15 bp, Homo sapiens
tcacaggctgtctca

SEQ ID NO: 184013 - DNA, 15 bp, Homo sapiens
cacaggctgtctcag

SEQ ID NO: 184014 - DNA, 15 bp, Homo sapiens
acaggctgtctcagg

SEQ ID NO: 184015 - DNA, 15 bp, Homo sapiens
caggctgtctcaggg

SEQ ID NO: 184016 - DNA, 15 bp, Homo sapiens
aggctgtctcagggg

SEQ ID NO: 184017 - DNA, 15 bp, Homo sapiens
ggctgtctcaggggc

SEQ ID NO: 184018 - DNA, 15 bp, Homo sapiens
gctgtctcaggggcc

SEQ ID NO: 184019 - DNA, 15 bp, Homo sapiens
ctgtctcaggggcct

SEQ ID NO: 184020 - DNA, 15 bp, Homo sapiens
tgtctcaggggcctc

SEQ ID NO: 184021 - DNA, 15 bp, Homo sapiens
gtctcaggggcctcc

SEQ ID NO: 184022 - DNA, 15 bp, Homo sapiens
tctcaggggcctcca

SEQ ID NO: 184023 - DNA, 15 bp, Homo sapiens
ctcaggggcctccaa

SEQ ID NO: 184024 - DNA, 15 bp, Homo sapiens
tcaggggcctccaac

SEQ ID NO: 184025 - DNA, 15 bp, Homo sapiens
caggggcctccaaca

SEQ ID NO: 184026 - DNA, 15 bp, Homo sapiens
aggggcctccaacaa

SEQ ID NO: 184027 - DNA, 15 bp, Homo sapiens
ggggcctccaacaac

SEQ ID NO: 184028 - DNA, 15 bp, Homo sapiens
gggcctccaacaacc

SEQ ID NO: 184029 - DNA, 15 bp, Homo sapiens
ggcctccaacaaccc

SEQ ID NO: 184030 - DNA, 15 bp, Homo sapiens
gcctccaacaaccct

SEQ ID NO: 184031 - DNA, 15 bp, Homo sapiens
cctccaacaaccctg

SEQ ID NO: 184032 - DNA, 15 bp, Homo sapiens
ctccaacaaccctga

SEQ ID NO: 184033 - DNA, 15 bp, Homo sapiens
tccaacaaccctgac

SEQ ID NO: 184034 - DNA, 15 bp, Homo sapiens
ccaacaaccctgacc

SEQ ID NO: 184035 - DNA, 15 bp, Homo sapiens
caacaaccctgacca

SEQ ID NO: 184036 - DNA, 15 bp, Homo sapiens
aacaaccctgaccat

SEQ ID NO: 184037 - DNA, 15 bp, Homo sapiens
acaaccctgaccatt

SEQ ID NO: 184038 - DNA, 15 bp, Homo sapiens
caaccctgaccattc

SEQ ID NO: 184039 - DNA, 15 bp, Homo sapiens
aaccctgaccattct

SEQ ID NO: 184040 - DNA, 15 bp, Homo sapiens
accctgaccattctt

SEQ ID NO: 184041 - DNA, 15 bp, Homo sapiens
ccctgaccattcttg

SEQ ID NO: 184042 - DNA, 15 bp, Homo sapiens
cctgaccattcttgc

SEQ ID NO: 184043 - DNA, 15 bp, Homo sapiens
ctgaccattcttgcc

SEQ ID NO: 184044 - DNA, 15 bp, Homo sapiens
tgaccattcttgccc

SEQ ID NO: 184045 - DNA, 15 bp, Homo sapiens
gaccattcttgcccc

SEQ ID NO: 184046 - DNA, 15 bp, Homo sapiens
accattcttgcccca

SEQ ID NO: 184047 - DNA, 15 bp, Homo sapiens
ccattcttgccccat

SEQ ID NO: 184048 - DNA, 15 bp, Homo sapiens
cattcttgccccatt

SEQ ID NO: 184049 - DNA, 15 bp, Homo sapiens
attcttgccccattt

SEQ ID NO: 184050 - DNA, 15 bp, Homo sapiens
ttcttgccccatttt

SEQ ID NO: 184051 - DNA, 15 bp, Homo sapiens
tcttgccccattttg

SEQ ID NO: 184052 - DNA, 15 bp, Homo sapiens
cttgccccattttgc

SEQ ID NO: 184053 - DNA, 15 bp, Homo sapiens
ttgccccattttgca

SEQ ID NO: 184054 - DNA, 15 bp, Homo sapiens
tgccccattttgcag

SEQ ID NO: 184055 - DNA, 15 bp, Homo sapiens
gccccattttgcaga

SEQ ID NO: 184056 - DNA, 15 bp, Homo sapiens
ccccattttgcagat

SEQ ID NO: 184057 - DNA, 15 bp, Homo sapiens
cccattttgcagata

SEQ ID NO: 184058 - DNA, 15 bp, Homo sapiens
ccattttgcagatag

SEQ ID NO: 184059 - DNA, 15 bp, Homo sapiens
cattttgcagataga

SEQ ID NO: 184060 - DNA, 15 bp, Homo sapiens
attttgcagatagaa

SEQ ID NO: 184061 - DNA, 15 bp, Homo sapiens
ttttgcagatagaaa

SEQ ID NO: 184062 - DNA, 15 bp, Homo sapiens
tttgcagatagaaaa

SEQ ID NO: 184063 - DNA, 15 bp, Homo sapiens
ttgcagatagaaaac

SEQ ID NO: 184064 - DNA, 15 bp, Homo sapiens
tgcagatagaaaacc

SEQ ID NO: 184065 - DNA, 15 bp, Homo sapiens
gcagatagaaaaccg

SEQ ID NO: 184066 - DNA, 15 bp, Homo sapiens
cagatagaaaaccga

SEQ ID NO: 184067 - DNA, 15 bp, Homo sapiens
agatagaaaaccgag

SEQ ID NO: 184068 - DNA, 15 bp, Homo sapiens
gatagaaaaccgagg

SEQ ID NO: 184069 - DNA, 15 bp, Homo sapiens
atagaaaaccgaggc

SEQ ID NO: 184070 - DNA, 15 bp, Homo sapiens
tagaaaaccgaggct

SEQ ID NO: 184071 - DNA, 15 bp, Homo sapiens
agaaaaccgaggctc

SEQ ID NO: 184072 - DNA, 15 bp, Homo sapiens
gaaaaccgaggctca

SEQ ID NO: 184073 - DNA, 15 bp, Homo sapiens
aaaaccgaggctcag

SEQ ID NO: 184074 - DNA, 15 bp, Homo sapiens
aaaccgaggctcaga

SEQ ID NO: 184075 - DNA, 15 bp, Homo sapiens
aaccgaggctcagag

SEQ ID NO: 184076 - DNA, 15 bp, Homo sapiens
accgaggctcagaga

SEQ ID NO: 184077 - DNA, 15 bp, Homo sapiens
ccgaggctcagagag

SEQ ID NO: 184078 - DNA, 15 bp, Homo sapiens
cgaggctcagagaga

SEQ ID NO: 184079 - DNA, 15 bp, Homo sapiens
gaggctcagagagat

SEQ ID NO: 184080 - DNA, 15 bp, Homo sapiens
aggctcagagagatt

SEQ ID NO: 184081 - DNA, 15 bp, Homo sapiens
ggctcagagagatta

SEQ ID NO: 184082 - DNA, 15 bp, Homo sapiens
gctcagagagattat

SEQ ID NO: 184083 - DNA, 15 bp, Homo sapiens
ctcagagagattata

SEQ ID NO: 184084 - DNA, 15 bp, Homo sapiens
tcagagagattatat

SEQ ID NO: 184085 - DNA, 15 bp, Homo sapiens
cagagagattatata

SEQ ID NO: 184086 - DNA, 15 bp, Homo sapiens
agagagattatataa

SEQ ID NO: 184087 - DNA, 15 bp, Homo sapiens
gagagattatataac

SEQ ID NO: 184088 - DNA, 15 bp, Homo sapiens
agagattatataact

SEQ ID NO: 184089 - DNA, 15 bp, Homo sapiens
gagattatataactt

SEQ ID NO: 184090 - DNA, 15 bp, Homo sapiens
agattatataacttg

SEQ ID NO: 184091 - DNA, 15 bp, Homo sapiens
gattatataacttgc

SEQ ID NO: 184092 - DNA, 15 bp, Homo sapiens
attatataacttgcc

SEQ ID NO: 184093 - DNA, 15 bp, Homo sapiens
ttatataacttgccc

SEQ ID NO: 184094 - DNA, 15 bp, Homo sapiens
tatataacttgccca

SEQ ID NO: 184095 - DNA, 15 bp, Homo sapiens
atataacttgcccac

SEQ ID NO: 184096 - DNA, 15 bp, Homo sapiens
tataacttgcccacg

SEQ ID NO: 184097 - DNA, 15 bp, Homo sapiens
ataacttgcccacga

SEQ ID NO: 184098 - DNA, 15 bp, Homo sapiens
taacttgcccacgat

SEQ ID NO: 184099 - DNA, 15 bp, Homo sapiens
aacttgcccacgatc

SEQ ID NO: 184100 - DNA, 15 bp, Homo sapiens
acttgcccacgatct

SEQ ID NO: 184101 - DNA, 15 bp, Homo sapiens
cttgcccacgatctt

SEQ ID NO: 184102 - DNA, 15 bp, Homo sapiens
ttgcccacgatcttc

SEQ ID NO: 184103 - DNA, 15 bp, Homo sapiens
tgcccacgatcttcc

SEQ ID NO: 184104 - DNA, 15 bp, Homo sapiens
gcccacgatcttcct

SEQ ID NO: 184105 - DNA, 15 bp, Homo sapiens
cccacgatcttcctc

SEQ ID NO: 184106 - DNA, 15 bp, Homo sapiens
ccacgatcttcctcc

SEQ ID NO: 184107 - DNA, 15 bp, Homo sapiens
cacgatcttcctcca

SEQ ID NO: 184108 - DNA, 15 bp, Homo sapiens
acgatcttcctccag

SEQ ID NO: 184109 - DNA, 15 bp, Homo sapiens
cgatcttcctccagc

SEQ ID NO: 184110 - DNA, 15 bp, Homo sapiens
gatcttcctccagca

SEQ ID NO: 184111 - DNA, 15 bp, Homo sapiens
atcttcctccagcaa

SEQ ID NO: 184112 - DNA, 15 bp, Homo sapiens
tcttcctccagcaag

SEQ ID NO: 184113 - DNA, 15 bp, Homo sapiens
cttcctccagcaaga

SEQ ID NO: 184114 - DNA, 15 bp, Homo sapiens
ttcctccagcaagat

SEQ ID NO: 184115 - DNA, 15 bp, Homo sapiens
tcctccagcaagatg

SEQ ID NO: 184116 - DNA, 15 bp, Homo sapiens
cctccagcaagatgg

SEQ ID NO: 184117 - DNA, 15 bp, Homo sapiens
ctccagcaagatgga

SEQ ID NO: 184118 - DNA, 15 bp, Homo sapiens
tccagcaagatggag

SEQ ID NO: 184119 - DNA, 15 bp, Homo sapiens
ccagcaagatggagg

SEQ ID NO: 184120 - DNA, 15 bp, Homo sapiens
cagcaagatggaggc

SEQ ID NO: 184121 - DNA, 15 bp, Homo sapiens
agcaagatggaggcc

SEQ ID NO: 184122 - DNA, 15 bp, Homo sapiens
gcaagatggaggcca

SEQ ID NO: 184123 - DNA, 15 bp, Homo sapiens
caagatggaggccaa

SEQ ID NO: 184124 - DNA, 15 bp, Homo sapiens
aagatggaggccaag

SEQ ID NO: 184125 - DNA, 15 bp, Homo sapiens
agatggaggccaagt

SEQ ID NO: 184126 - DNA, 15 bp, Homo sapiens
gatggaggccaagtg

SEQ ID NO: 184127 - DNA, 15 bp, Homo sapiens
atggaggccaagtga

SEQ ID NO: 184128 - DNA, 15 bp, Homo sapiens
tggaggccaagtgaa

SEQ ID NO: 184129 - DNA, 15 bp, Homo sapiens
ggaggccaagtgaaa

SEQ ID NO: 184130 - DNA, 15 bp, Homo sapiens
gaggccaagtgaaat

SEQ ID NO: 184131 - DNA, 15 bp, Homo sapiens
aggccaagtgaaatg

SEQ ID NO: 184132 - DNA, 15 bp, Homo sapiens
ggccaagtgaaatga

SEQ ID NO: 184133 - DNA, 15 bp, Homo sapiens
gccaagtgaaatgag

SEQ ID NO: 184134 - DNA, 15 bp, Homo sapiens
ccaagtgaaatgaga

SEQ ID NO: 184135 - DNA, 15 bp, Homo sapiens
caagtgaaatgagaa

SEQ ID NO: 184136 - DNA, 15 bp, Homo sapiens
aagtgaaatgagaaa

SEQ ID NO: 184137 - DNA, 15 bp, Homo sapiens
agtgaaatgagaaag

SEQ ID NO: 184138 - DNA, 15 bp, Homo sapiens
gtgaaatgagaaagc

SEQ ID NO: 184139 - DNA, 15 bp, Homo sapiens
tgaaatgagaaagca

SEQ ID NO: 184140 - DNA, 15 bp, Homo sapiens
gaaatgagaaagcag

SEQ ID NO: 184141 - DNA, 15 bp, Homo sapiens
aaatgagaaagcagg

SEQ ID NO: 184142 - DNA, 15 bp, Homo sapiens
aatgagaaagcaggt

SEQ ID NO: 184143 - DNA, 15 bp, Homo sapiens
atgagaaagcaggtc

SEQ ID NO: 184144 - DNA, 15 bp, Homo sapiens
tgagaaagcaggtct

SEQ ID NO: 184145 - DNA, 15 bp, Homo sapiens
gagaaagcaggtctc

SEQ ID NO: 184146 - DNA, 15 bp, Homo sapiens
agaaagcaggtctcc

SEQ ID NO: 184147 - DNA, 15 bp, Homo sapiens
gaaagcaggtctcct

SEQ ID NO: 184148 - DNA, 15 bp, Homo sapiens
aaagcaggtctcctg

SEQ ID NO: 184149 - DNA, 15 bp, Homo sapiens
aagcaggtctcctgc

SEQ ID NO: 184150 - DNA, 15 bp, Homo sapiens
agcaggtctcctgcc

SEQ ID NO: 184151 - DNA, 15 bp, Homo sapiens
gcaggtctcctgcca

SEQ ID NO: 184152 - DNA, 15 bp, Homo sapiens
caggtctcctgccac

SEQ ID NO: 184153 - DNA, 15 bp, Homo sapiens
aggtctcctgccact

SEQ ID NO: 184154 - DNA, 15 bp, Homo sapiens
ggtctcctgccactt

SEQ ID NO: 184155 - DNA, 15 bp, Homo sapiens
gtctcctgccacttc

SEQ ID NO: 184156 - DNA, 15 bp, Homo sapiens
tctcctgccacttcc

SEQ ID NO: 184157 - DNA, 15 bp, Homo sapiens
ctcctgccacttcct

SEQ ID NO: 184158 - DNA, 15 bp, Homo sapiens
tcctgccacttcctt

SEQ ID NO: 184159 - DNA, 15 bp, Homo sapiens
cctgccacttccttt

SEQ ID NO: 184160 - DNA, 15 bp, Homo sapiens
ctgccacttcctttg

SEQ ID NO: 184161 - DNA, 15 bp, Homo sapiens
tgccacttcctttgc

SEQ ID NO: 184162 - DNA, 15 bp, Homo sapiens
gccacttcctttgcc

SEQ ID NO: 184163 - DNA, 15 bp, Homo sapiens
ccacttcctttgccc

SEQ ID NO: 184164 - DNA, 15 bp, Homo sapiens
cacttcctttgccca

SEQ ID NO: 184165 - DNA, 15 bp, Homo sapiens
acttcctttgcccag

SEQ ID NO: 184166 - DNA, 15 bp, Homo sapiens
cttcctttgcccaga

SEQ ID NO: 184167 - DNA, 15 bp, Homo sapiens
ttcctttgcccagag

SEQ ID NO: 184168 - DNA, 15 bp, Homo sapiens
tcctttgcccagagg

SEQ ID NO: 184169 - DNA, 15 bp, Homo sapiens
cctttgcccagaggt

SEQ ID NO: 184170 - DNA, 15 bp, Homo sapiens
ctttgcccagaggtc

SEQ ID NO: 184171 - DNA, 15 bp, Homo sapiens
tttgcccagaggtct

SEQ ID NO: 184172 - DNA, 15 bp, Homo sapiens
ttgcccagaggtctt

SEQ ID NO: 184173 - DNA, 15 bp, Homo sapiens
tgcccagaggtcttc

SEQ ID NO: 184174 - DNA, 15 bp, Homo sapiens
gcccagaggtcttct

SEQ ID NO: 184175 - DNA, 15 bp, Homo sapiens
cccagaggtcttctc

SEQ ID NO: 184176 - DNA, 15 bp, Homo sapiens
ccagaggtcttctcc

SEQ ID NO: 184177 - DNA, 15 bp, Homo sapiens
cagaggtcttctccc

SEQ ID NO: 184178 - DNA, 15 bp, Homo sapiens
agaggtcttctcccc

SEQ ID NO: 184179 - DNA, 15 bp, Homo sapiens
gaggtcttctcccca

SEQ ID NO: 184180 - DNA, 15 bp, Homo sapiens
aggtcttctccccac

SEQ ID NO: 184181 - DNA, 15 bp, Homo sapiens
ggtcttctccccaca

SEQ ID NO: 184182 - DNA, 15 bp, Homo sapiens
gtcttctccccacac

SEQ ID NO: 184183 - DNA, 15 bp, Homo sapiens
tcttctccccacacc

SEQ ID NO: 184184 - DNA, 15 bp, Homo sapiens
cttctccccacacca

SEQ ID NO: 184185 - DNA, 15 bp, Homo sapiens
ttctccccacaccag

SEQ ID NO: 184186 - DNA, 15 bp, Homo sapiens
tctccccacaccagg

SEQ ID NO: 184187 - DNA, 15 bp, Homo sapiens
ctccccacaccaggg

SEQ ID NO: 184188 - DNA, 15 bp, Homo sapiens
tccccacaccagggc

SEQ ID NO: 184189 - DNA, 15 bp, Homo sapiens
ccccacaccagggct

SEQ ID NO: 184190 - DNA, 15 bp, Homo sapiens
cccacaccagggctt

SEQ ID NO: 184191 - DNA, 15 bp, Homo sapiens
ccacaccagggcttc

SEQ ID NO: 184192 - DNA, 15 bp, Homo sapiens
cacaccagggcttcc

SEQ ID NO: 184193 - DNA, 15 bp, Homo sapiens
acaccagggcttccc

SEQ ID NO: 184194 - DNA, 15 bp, Homo sapiens
caccagggcttccca

SEQ ID NO: 184195 - DNA, 15 bp, Homo sapiens
accagggcttcccaa

SEQ ID NO: 184196 - DNA, 15 bp, Homo sapiens
ccagggcttcccaag

SEQ ID NO: 184197 - DNA, 15 bp, Homo sapiens
cagggcttcccaagg

SEQ ID NO: 184198 - DNA, 15 bp, Homo sapiens
agggcttcccaaggg

SEQ ID NO: 184199 - DNA, 15 bp, Homo sapiens
gggcttcccaagggc

SEQ ID NO: 184200 - DNA, 15 bp, Homo sapiens
ggcttcccaagggct

SEQ ID NO: 184201 - DNA, 15 bp, Homo sapiens
gcttcccaagggctg

SEQ ID NO: 184202 - DNA, 15 bp, Homo sapiens
cttcccaagggctga

SEQ ID NO: 184203 - DNA, 15 bp, Homo sapiens
ttcccaagggctgag

SEQ ID NO: 184204 - DNA, 15 bp, Homo sapiens
tcccaagggctgaga

SEQ ID NO: 184205 - DNA, 15 bp, Homo sapiens
cccaagggctgagat

SEQ ID NO: 184206 - DNA, 15 bp, Homo sapiens
ccaagggctgagatc

SEQ ID NO: 184207 - DNA, 15 bp, Homo sapiens
caagggctgagatcc

SEQ ID NO: 184208 - DNA, 15 bp, Homo sapiens
aagggctgagatcca

SEQ ID NO: 184209 - DNA, 15 bp, Homo sapiens
agggctgagatccag

SEQ ID NO: 184210 - DNA, 15 bp, Homo sapiens
gggctgagatccagt

SEQ ID NO: 184211 - DNA, 15 bp, Homo sapiens
ggctgagatccagtc

SEQ ID NO: 184212 - DNA, 15 bp, Homo sapiens
gctgagatccagtca

SEQ ID NO: 184213 - DNA, 15 bp, Homo sapiens
ctgagatccagtcac

SEQ ID NO: 184214 - DNA, 15 bp, Homo sapiens
tgagatccagtcaca

SEQ ID NO: 184215 - DNA, 15 bp, Homo sapiens
gagatccagtcacac

SEQ ID NO: 184216 - DNA, 15 bp, Homo sapiens
agatccagtcacacc

SEQ ID NO: 184217 - DNA, 15 bp, Homo sapiens
gatccagtcacacct

SEQ ID NO: 184218 - DNA, 15 bp, Homo sapiens
atccagtcacacctg

SEQ ID NO: 184219 - DNA, 15 bp, Homo sapiens
tccagtcacacctgt

SEQ ID NO: 184220 - DNA, 15 bp, Homo sapiens
ccagtcacacctgtg

SEQ ID NO: 184221 - DNA, 15 bp, Homo sapiens
cagtcacacctgtgc

SEQ ID NO: 184222 - DNA, 15 bp, Homo sapiens
agtcacacctgtgcg

SEQ ID NO: 184223 - DNA, 15 bp, Homo sapiens
gtcacacctgtgcgt

SEQ ID NO: 184224 - DNA, 15 bp, Homo sapiens
tcacacctgtgcgtg

SEQ ID NO: 184225 - DNA, 15 bp, Homo sapiens
cacacctgtgcgtga

SEQ ID NO: 184226 - DNA, 15 bp, Homo sapiens
acacctgtgcgtgat

SEQ ID NO: 184227 - DNA, 15 bp, Homo sapiens
cacctgtgcgtgatc

SEQ ID NO: 184228 - DNA, 15 bp, Homo sapiens
acctgtgcgtgatca

SEQ ID NO: 184229 - DNA, 15 bp, Homo sapiens
cctgtgcgtgatcaa

SEQ ID NO: 184230 - DNA, 15 bp, Homo sapiens
ctgtgcgtgatcaaa

SEQ ID NO: 184231 - DNA, 15 bp, Homo sapiens
tgtgcgtgatcaaat

SEQ ID NO: 184232 - DNA, 15 bp, Homo sapiens
gtgcgtgatcaaata

SEQ ID NO: 184233 - DNA, 15 bp, Homo sapiens
tgcgtgatcaaatat

SEQ ID NO: 184234 - DNA, 15 bp, Homo sapiens
gcgtgatcaaatata

SEQ ID NO: 184235 - DNA, 15 bp, Homo sapiens
cgtgatcaaatataa

SEQ ID NO: 184236 - DNA, 15 bp, Homo sapiens
gtgatcaaatataag

SEQ ID NO: 184237 - DNA, 15 bp, Homo sapiens
tgatcaaatataagt

SEQ ID NO: 184238 - DNA, 15 bp, Homo sapiens
gatcaaatataagtg

SEQ ID NO: 184239 - DNA, 15 bp, Homo sapiens
atcaaatataagtgt

SEQ ID NO: 184240 - DNA, 15 bp, Homo sapiens
tcaaatataagtgtg

SEQ ID NO: 184241 - DNA, 15 bp, Homo sapiens
caaatataagtgtga

SEQ ID NO: 184242 - DNA, 15 bp, Homo sapiens
aaatataagtgtgaa

SEQ ID NO: 184243 - DNA, 15 bp, Homo sapiens
aatataagtgtgaac

SEQ ID NO: 184244 - DNA, 15 bp, Homo sapiens
atataagtgtgaaca

SEQ ID NO: 184245 - DNA, 15 bp, Homo sapiens
tataagtgtgaacaa

SEQ ID NO: 184246 - DNA, 15 bp, Homo sapiens
ataagtgtgaacaat

SEQ ID NO: 184247 - DNA, 15 bp, Homo sapiens
taagtgtgaacaatg

SEQ ID NO: 184248 - DNA, 15 bp, Homo sapiens
aagtgtgaacaatgc

SEQ ID NO: 184249 - DNA, 15 bp, Homo sapiens
agtgtgaacaatgca

SEQ ID NO: 184250 - DNA, 15 bp, Homo sapiens
gtgtgaacaatgcaa

SEQ ID NO: 184251 - DNA, 15 bp, Homo sapiens
tgtgaacaatgcaaa

SEQ ID NO: 184252 - DNA, 15 bp, Homo sapiens
gtgaacaatgcaaag

SEQ ID NO: 184253 - DNA, 15 bp, Homo sapiens
tgaacaatgcaaagg

SEQ ID NO: 184254 - DNA, 15 bp, Homo sapiens
gaacaatgcaaaggg

SEQ ID NO: 184255 - DNA, 15 bp, Homo sapiens
aacaatgcaaaggga

SEQ ID NO: 184256 - DNA, 15 bp, Homo sapiens
acaatgcaaagggag

SEQ ID NO: 184257 - DNA, 15 bp, Homo sapiens
caatgcaaagggaga

SEQ ID NO: 184258 - DNA, 15 bp, Homo sapiens
aatgcaaagggagac

SEQ ID NO: 184259 - DNA, 15 bp, Homo sapiens
atgcaaagggagacg

SEQ ID NO: 184260 - DNA, 15 bp, Homo sapiens
tgcaaagggagacgt

SEQ ID NO: 184261 - DNA, 15 bp, Homo sapiens
gcaaagggagacgtc

SEQ ID NO: 184262 - DNA, 15 bp, Homo sapiens
caaagggagacgtct

SEQ ID NO: 184263 - DNA, 15 bp, Homo sapiens
aaagggagacgtctt

SEQ ID NO: 184264 - DNA, 15 bp, Homo sapiens
aagggagacgtcttc

SEQ ID NO: 184265 - DNA, 15 bp, Homo sapiens
agggagacgtcttca

SEQ ID NO: 184266 - DNA, 15 bp, Homo sapiens
gggagacgtcttcaa

SEQ ID NO: 184267 - DNA, 15 bp, Homo sapiens
ggagacgtcttcaat

SEQ ID NO: 184268 - DNA, 15 bp, Homo sapiens
gagacgtcttcaatc

SEQ ID NO: 184269 - DNA, 15 bp, Homo sapiens
agacgtcttcaatct

SEQ ID NO: 184270 - DNA, 15 bp, Homo sapiens
gacgtcttcaatcta

SEQ ID NO: 184271 - DNA, 15 bp, Homo sapiens
acgtcttcaatctaa

SEQ ID NO: 184272 - DNA, 15 bp, Homo sapiens
cgtcttcaatctaag

SEQ ID NO: 184273 - DNA, 15 bp, Homo sapiens
gtcttcaatctaagg

SEQ ID NO: 184274 - DNA, 15 bp, Homo sapiens
tcttcaatctaaggg

SEQ ID NO: 184275 - DNA, 15 bp, Homo sapiens
cttcaatctaagggg

SEQ ID NO: 184276 - DNA, 15 bp, Homo sapiens
ttcaatctaaggggc

SEQ ID NO: 184277 - DNA, 15 bp, Homo sapiens
tcaatctaaggggct

SEQ ID NO: 184278 - DNA, 15 bp, Homo sapiens
caatctaaggggctt

SEQ ID NO: 184279 - DNA, 15 bp, Homo sapiens
aatctaaggggcttc

SEQ ID NO: 184280 - DNA, 15 bp, Homo sapiens
atctaaggggcttca

SEQ ID NO: 184281 - DNA, 15 bp, Homo sapiens
tctaaggggcttcaa

SEQ ID NO: 184282 - DNA, 15 bp, Homo sapiens
ctaaggggcttcaat

SEQ ID NO: 184283 - DNA, 15 bp, Homo sapiens
taaggggcttcaatt

SEQ ID NO: 184284 - DNA, 15 bp, Homo sapiens
aaggggcttcaattc

SEQ ID NO: 184285 - DNA, 15 bp, Homo sapiens
aggggcttcaattct

SEQ ID NO: 184286 - DNA, 15 bp, Homo sapiens
ggggcttcaattctg

SEQ ID NO: 184287 - DNA, 15 bp, Homo sapiens
gggcttcaattctgt

SEQ ID NO: 184288 - DNA, 15 bp, Homo sapiens
ggcttcaattctgta

SEQ ID NO: 184289 - DNA, 15 bp, Homo sapiens
gcttcaattctgtaa

SEQ ID NO: 184290 - DNA, 15 bp, Homo sapiens
cttcaattctgtaat

SEQ ID NO: 184291 - DNA, 15 bp, Homo sapiens
ttcaattctgtaatg

SEQ ID NO: 184292 - DNA, 15 bp, Homo sapiens
tcaattctgtaatgt

SEQ ID NO: 184293 - DNA, 15 bp, Homo sapiens
caattctgtaatgta

SEQ ID NO: 184294 - DNA, 15 bp, Homo sapiens
aattctgtaatgtaa

SEQ ID NO: 184295 - DNA, 15 bp, Homo sapiens
attctgtaatgtaat

SEQ ID NO: 184296 - DNA, 15 bp, Homo sapiens
ttctgtaatgtaatt

SEQ ID NO: 184297 - DNA, 15 bp, Homo sapiens
tctgtaatgtaattc

SEQ ID NO: 184298 - DNA, 15 bp, Homo sapiens
ctgtaatgtaattct

SEQ ID NO: 184299 - DNA, 15 bp, Homo sapiens
tgtaatgtaattctg

SEQ ID NO: 184300 - DNA, 15 bp, Homo sapiens
gtaatgtaattctga

SEQ ID NO: 184301 - DNA, 15 bp, Homo sapiens
taatgtaattctgag

SEQ ID NO: 184302 - DNA, 15 bp, Homo sapiens
aatgtaattctgaga

SEQ ID NO: 184303 - DNA, 15 bp, Homo sapiens
atgtaattctgagat

SEQ ID NO: 184304 - DNA, 15 bp, Homo sapiens
tgtaattctgagatt

SEQ ID NO: 184305 - DNA, 15 bp, Homo sapiens
gtaattctgagatta

SEQ ID NO: 184306 - DNA, 15 bp, Homo sapiens
taattctgagattat

SEQ ID NO: 184307 - DNA, 15 bp, Homo sapiens
aattctgagattatg

SEQ ID NO: 184308 - DNA, 15 bp, Homo sapiens
attctgagattatgc

SEQ ID NO: 184309 - DNA, 15 bp, Homo sapiens
ttctgagattatgcc

SEQ ID NO: 184310 - DNA, 15 bp, Homo sapiens
tctgagattatgccc

SEQ ID NO: 184311 - DNA, 15 bp, Homo sapiens
ctgagattatgccct

SEQ ID NO: 184312 - DNA, 15 bp, Homo sapiens
tgagattatgccctt

SEQ ID NO: 184313 - DNA, 15 bp, Homo sapiens
gagattatgcccttt

SEQ ID NO: 184314 - DNA, 15 bp, Homo sapiens
agattatgccctttt

SEQ ID NO: 184315 - DNA, 15 bp, Homo sapiens
gattatgcccttttt

SEQ ID NO: 184316 - DNA, 15 bp, Homo sapiens
attatgccctttttt

SEQ ID NO: 184317 - DNA, 15 bp, Homo sapiens
ttatgcccttttttg

SEQ ID NO: 184318 - DNA, 15 bp, Homo sapiens
tatgcccttttttgt

SEQ ID NO: 184319 - DNA, 15 bp, Homo sapiens
atgcccttttttgtt

SEQ ID NO: 184320 - DNA, 15 bp, Homo sapiens
tgcccttttttgtta

SEQ ID NO: 184321 - DNA, 15 bp, Homo sapiens
gcccttttttgttaa

SEQ ID NO: 184322 - DNA, 15 bp, Homo sapiens
cccttttttgttaaa

SEQ ID NO: 184323 - DNA, 15 bp, Homo sapiens
ccttttttgttaaag

SEQ ID NO: 184324 - DNA, 15 bp, Homo sapiens
cttttttgttaaagc

SEQ ID NO: 184325 - DNA, 15 bp, Homo sapiens
ttttttgttaaagcc

SEQ ID NO: 184326 - DNA, 15 bp, Homo sapiens
tttttgttaaagcct

SEQ ID NO: 184327 - DNA, 15 bp, Homo sapiens
ttttgttaaagcctt

SEQ ID NO: 184328 - DNA, 15 bp, Homo sapiens
tttgttaaagccttt

SEQ ID NO: 184329 - DNA, 15 bp, Homo sapiens
ttgttaaagcctttc

SEQ ID NO: 184330 - DNA, 15 bp, Homo sapiens
tgttaaagcctttcc

SEQ ID NO: 184331 - DNA, 15 bp, Homo sapiens
gttaaagcctttcct

SEQ ID NO: 184332 - DNA, 15 bp, Homo sapiens
ttaaagcctttcctt

SEQ ID NO: 184333 - DNA, 15 bp, Homo sapiens
taaagcctttccttt

SEQ ID NO: 184334 - DNA, 15 bp, Homo sapiens
aaagcctttcctttt

SEQ ID NO: 184335 - DNA, 15 bp, Homo sapiens
aagcctttccttttt

SEQ ID NO: 184336 - DNA, 15 bp, Homo sapiens
agcctttcctttttg

SEQ ID NO: 184337 - DNA, 15 bp, Homo sapiens
gcctttcctttttga

SEQ ID NO: 184338 - DNA, 15 bp, Homo sapiens
cctttcctttttgaa

SEQ ID NO: 184339 - DNA, 15 bp, Homo sapiens
ctttcctttttgaag

SEQ ID NO: 184340 - DNA, 15 bp, Homo sapiens
tttcctttttgaagt

SEQ ID NO: 184341 - DNA, 15 bp, Homo sapiens
ttcctttttgaagtg

SEQ ID NO: 184342 - DNA, 15 bp, Homo sapiens
tcctttttgaagtga

SEQ ID NO: 184343 - DNA, 15 bp, Homo sapiens
cctttttgaagtgat

SEQ ID NO: 184344 - DNA, 15 bp, Homo sapiens
ctttttgaagtgatg

SEQ ID NO: 184345 - DNA, 15 bp, Homo sapiens
tttttgaagtgatgg

SEQ ID NO: 184346 - DNA, 15 bp, Homo sapiens
ttttgaagtgatggt

SEQ ID NO: 184347 - DNA, 15 bp, Homo sapiens
tttgaagtgatggtc

SEQ ID NO: 184348 - DNA, 15 bp, Homo sapiens
ttgaagtgatggtca

SEQ ID NO: 184349 - DNA, 15 bp, Homo sapiens
tgaagtgatggtcac

SEQ ID NO: 184350 - DNA, 15 bp, Homo sapiens
gaagtgatggtcact

SEQ ID NO: 184351 - DNA, 15 bp, Homo sapiens
aagtgatggtcactg

SEQ ID NO: 184352 - DNA, 15 bp, Homo sapiens
agtgatggtcactgt

SEQ ID NO: 184353 - DNA, 15 bp, Homo sapiens
gtgatggtcactgta

SEQ ID NO: 184354 - DNA, 15 bp, Homo sapiens
tgatggtcactgtag

SEQ ID NO: 184355 - DNA, 15 bp, Homo sapiens
gatggtcactgtaga

SEQ ID NO: 184356 - DNA, 15 bp, Homo sapiens
atggtcactgtagat

SEQ ID NO: 184357 - DNA, 15 bp, Homo sapiens
tggtcactgtagatg

SEQ ID NO: 184358 - DNA, 15 bp, Homo sapiens
ggtcactgtagatgg

SEQ ID NO: 184359 - DNA, 15 bp, Homo sapiens
gtcactgtagatggt

SEQ ID NO: 184360 - DNA, 15 bp, Homo sapiens
tcactgtagatggtg

SEQ ID NO: 184361 - DNA, 15 bp, Homo sapiens
cactgtagatggtga

SEQ ID NO: 184362 - DNA, 15 bp, Homo sapiens
actgtagatggtgag

SEQ ID NO: 184363 - DNA, 15 bp, Homo sapiens
ctgtagatggtgagg

SEQ ID NO: 184364 - DNA, 15 bp, Homo sapiens
tgtagatggtgaggg

SEQ ID NO: 184365 - DNA, 15 bp, Homo sapiens
gtagatggtgagggt

SEQ ID NO: 184366 - DNA, 15 bp, Homo sapiens
tagatggtgagggtt

SEQ ID NO: 184367 - DNA, 15 bp, Homo sapiens
agatggtgagggttt

SEQ ID NO: 184368 - DNA, 15 bp, Homo sapiens
gatggtgagggtttt

SEQ ID NO: 184369 - DNA, 15 bp, Homo sapiens
atggtgagggttttt

SEQ ID NO: 184370 - DNA, 15 bp, Homo sapiens
tggtgagggtttttt

SEQ ID NO: 184371 - DNA, 15 bp, Homo sapiens
ggtgagggttttttg

SEQ ID NO: 184372 - DNA, 15 bp, Homo sapiens
gtgagggttttttgg

SEQ ID NO: 184373 - DNA, 15 bp, Homo sapiens
tgagggttttttgga

SEQ ID NO: 184374 - DNA, 15 bp, Homo sapiens
gagggttttttggag

SEQ ID NO: 184375 - DNA, 15 bp, Homo sapiens
agggttttttggagg

SEQ ID NO: 184376 - DNA, 15 bp, Homo sapiens
gggttttttggaggc

SEQ ID NO: 184377 - DNA, 15 bp, Homo sapiens
ggttttttggaggcg

SEQ ID NO: 184378 - DNA, 15 bp, Homo sapiens
gttttttggaggcgg

SEQ ID NO: 184379 - DNA, 15 bp, Homo sapiens
ttttttggaggcgga

SEQ ID NO: 184380 - DNA, 15 bp, Homo sapiens
tttttggaggcggac

SEQ ID NO: 184381 - DNA, 15 bp, Homo sapiens
ttttggaggcggaca

SEQ ID NO: 184382 - DNA, 15 bp, Homo sapiens
tttggaggcggacaa

SEQ ID NO: 184383 - DNA, 15 bp, Homo sapiens
ttggaggcggacaat

SEQ ID NO: 184384 - DNA, 15 bp, Homo sapiens
tggaggcggacaata

SEQ ID NO: 184385 - DNA, 15 bp, Homo sapiens
ggaggcggacaatat

SEQ ID NO: 184386 - DNA, 15 bp, Homo sapiens
gaggcggacaatatc

SEQ ID NO: 184387 - DNA, 15 bp, Homo sapiens
aggcggacaatatct

SEQ ID NO: 184388 - DNA, 15 bp, Homo sapiens
ggcggacaatatctt

SEQ ID NO: 184389 - DNA, 15 bp, Homo sapiens
gcggacaatatcttt

SEQ ID NO: 184390 - DNA, 15 bp, Homo sapiens
cggacaatatcttta

SEQ ID NO: 184391 - DNA, 15 bp, Homo sapiens
ggacaatatctttac

SEQ ID NO: 184392 - DNA, 15 bp, Homo sapiens
gacaatatctttaca

SEQ ID NO: 184393 - DNA, 15 bp, Homo sapiens
acaatatctttacat

SEQ ID NO: 184394 - DNA, 15 bp, Homo sapiens
caatatctttacatg

SEQ ID NO: 184395 - DNA, 15 bp, Homo sapiens
aatatctttacatga

SEQ ID NO: 184396 - DNA, 15 bp, Homo sapiens
atatctttacatgac

SEQ ID NO: 184397 - DNA, 15 bp, Homo sapiens
tatctttacatgaca

SEQ ID NO: 184398 - DNA, 15 bp, Homo sapiens
atctttacatgacaa

SEQ ID NO: 184399 - DNA, 15 bp, Homo sapiens
tctttacatgacaaa

SEQ ID NO: 184400 - DNA, 15 bp, Homo sapiens
ctttacatgacaaaa

SEQ ID NO: 184401 - DNA, 15 bp, Homo sapiens
tttacatgacaaaat

SEQ ID NO: 184402 - DNA, 15 bp, Homo sapiens
ttacatgacaaaatt

SEQ ID NO: 184403 - DNA, 15 bp, Homo sapiens
tacatgacaaaatta

SEQ ID NO: 184404 - DNA, 15 bp, Homo sapiens
acatgacaaaattaa

SEQ ID NO: 184405 - DNA, 15 bp, Homo sapiens
catgacaaaattaaa

SEQ ID NO: 184406 - DNA, 15 bp, Homo sapiens
atgacaaaattaaaa

SEQ ID NO: 184407 - DNA, 15 bp, Homo sapiens
tgacaaaattaaaag

SEQ ID NO: 184408 - DNA, 15 bp, Homo sapiens
gacaaaattaaaagt

SEQ ID NO: 184409 - DNA, 15 bp, Homo sapiens
acaaaattaaaagtt

SEQ ID NO: 184410 - DNA, 15 bp, Homo sapiens
caaaattaaaagttg

SEQ ID NO: 184411 - DNA, 15 bp, Homo sapiens
aaaattaaaagttgg

SEQ ID NO: 184412 - DNA, 15 bp, Homo sapiens
aaattaaaagttggc

SEQ ID NO: 184413 - DNA, 15 bp, Homo sapiens
aattaaaagttggca

SEQ ID NO: 184414 - DNA, 15 bp, Homo sapiens
attaaaagttggcag

SEQ ID NO: 184415 - DNA, 15 bp, Homo sapiens
ttaaaagttggcagc

SEQ ID NO: 184416 - DNA, 15 bp, Homo sapiens
taaaagttggcagct

SEQ ID NO: 184417 - DNA, 15 bp, Homo sapiens
aaaagttggcagctc

SEQ ID NO: 184418 - DNA, 15 bp, Homo sapiens
aaagttggcagctcc

SEQ ID NO: 184419 - DNA, 15 bp, Homo sapiens
aagttggcagctccg

SEQ ID NO: 184420 - DNA, 15 bp, Homo sapiens
agttggcagctccga

SEQ ID NO: 184421 - DNA, 15 bp, Homo sapiens
gttggcagctccgaa

SEQ ID NO: 184422 - DNA, 15 bp, Homo sapiens
ttggcagctccgaat

SEQ ID NO: 184423 - DNA, 15 bp, Homo sapiens
tggcagctccgaatt

SEQ ID NO: 184424 - DNA, 15 bp, Homo sapiens
ggcagctccgaattg

SEQ ID NO: 184425 - DNA, 15 bp, Homo sapiens
gcagctccgaattga

SEQ ID NO: 184426 - DNA, 15 bp, Homo sapiens
cagctccgaattgat

SEQ ID NO: 184427 - DNA, 15 bp, Homo sapiens
agctccgaattgatc

SEQ ID NO: 184428 - DNA, 15 bp, Homo sapiens
gctccgaattgatct

SEQ ID NO: 184429 - DNA, 15 bp, Homo sapiens
ctccgaattgatctc

SEQ ID NO: 184430 - DNA, 15 bp, Homo sapiens
tccgaattgatctct

SEQ ID NO: 184431 - DNA, 15 bp, Homo sapiens
ccgaattgatctctg

SEQ ID NO: 184432 - DNA, 15 bp, Homo sapiens
cgaattgatctctgg

SEQ ID NO: 184433 - DNA, 15 bp, Homo sapiens
gaattgatctctgga

SEQ ID NO: 184434 - DNA, 15 bp, Homo sapiens
aattgatctctggag

SEQ ID NO: 184435 - DNA, 15 bp, Homo sapiens
attgatctctggagt

SEQ ID NO: 184436 - DNA, 15 bp, Homo sapiens
ttgatctctggagtg

SEQ ID NO: 184437 - DNA, 15 bp, Homo sapiens
tgatctctggagtgt

SEQ ID NO: 184438 - DNA, 15 bp, Homo sapiens
gatctctggagtgtt

SEQ ID NO: 184439 - DNA, 15 bp, Homo sapiens
atctctggagtgttt

SEQ ID NO: 184440 - DNA, 15 bp, Homo sapiens
tctctggagtgtttt

SEQ ID NO: 184441 - DNA, 15 bp, Homo sapiens
ctctggagtgttttg

SEQ ID NO: 184442 - DNA, 15 bp, Homo sapiens
tctggagtgttttga

SEQ ID NO: 184443 - DNA, 15 bp, Homo sapiens
ctggagtgttttgaa

SEQ ID NO: 184444 - DNA, 15 bp, Homo sapiens
tggagtgttttgaaa

SEQ ID NO: 184445 - DNA, 15 bp, Homo sapiens
ggagtgttttgaaat

SEQ ID NO: 184446 - DNA, 15 bp, Homo sapiens
gagtgttttgaaatg

SEQ ID NO: 184447 - DNA, 15 bp, Homo sapiens
agtgttttgaaatgc

SEQ ID NO: 184448 - DNA, 15 bp, Homo sapiens
gtgttttgaaatgca

SEQ ID NO: 184449 - DNA, 15 bp, Homo sapiens
tgttttgaaatgcaa

SEQ ID NO: 184450 - DNA, 15 bp, Homo sapiens
gttttgaaatgcaag

SEQ ID NO: 184451 - DNA, 15 bp, Homo sapiens
ttttgaaatgcaaga

SEQ ID NO: 184452 - DNA, 15 bp, Homo sapiens
tttgaaatgcaagag

SEQ ID NO: 184453 - DNA, 15 bp, Homo sapiens
ttgaaatgcaagagg

SEQ ID NO: 184454 - DNA, 15 bp, Homo sapiens
tgaaatgcaagaggt

SEQ ID NO: 184455 - DNA, 15 bp, Homo sapiens
gaaatgcaagaggtc

SEQ ID NO: 184456 - DNA, 15 bp, Homo sapiens
aaatgcaagaggtct

SEQ ID NO: 184457 - DNA, 15 bp, Homo sapiens
aatgcaagaggtctc

SEQ ID NO: 184458 - DNA, 15 bp, Homo sapiens
atgcaagaggtctcc

SEQ ID NO: 184459 - DNA, 15 bp, Homo sapiens
tgcaagaggtctccg

SEQ ID NO: 184460 - DNA, 15 bp, Homo sapiens
gcaagaggtctccga

SEQ ID NO: 184461 - DNA, 15 bp, Homo sapiens
caagaggtctccgaa

SEQ ID NO: 184462 - DNA, 15 bp, Homo sapiens
aagaggtctccgaaa

SEQ ID NO: 184463 - DNA, 15 bp, Homo sapiens
agaggtctccgaaac

SEQ ID NO: 184464 - DNA, 15 bp, Homo sapiens
gaggtctccgaaacc

SEQ ID NO: 184465 - DNA, 15 bp, Homo sapiens
aggtctccgaaacct

SEQ ID NO: 184466 - DNA, 15 bp, Homo sapiens
ggtctccgaaacctc

SEQ ID NO: 184467 - DNA, 15 bp, Homo sapiens
gtctccgaaacctca

SEQ ID NO: 184468 - DNA, 15 bp, Homo sapiens
tctccgaaacctcag

SEQ ID NO: 184469 - DNA, 15 bp, Homo sapiens
ctccgaaacctcagt

SEQ ID NO: 184470 - DNA, 15 bp, Homo sapiens
tccgaaacctcagtc

SEQ ID NO: 184471 - DNA, 15 bp, Homo sapiens
ccgaaacctcagtct

SEQ ID NO: 184472 - DNA, 15 bp, Homo sapiens
cgaaacctcagtctg

SEQ ID NO: 184473 - DNA, 15 bp, Homo sapiens
gaaacctcagtctgg

SEQ ID NO: 184474 - DNA, 15 bp, Homo sapiens
aaacctcagtctggg

SEQ ID NO: 184475 - DNA, 15 bp, Homo sapiens
aacctcagtctggga

SEQ ID NO: 184476 - DNA, 15 bp, Homo sapiens
acctcagtctgggag

SEQ ID NO: 184477 - DNA, 15 bp, Homo sapiens
cctcagtctgggagc

SEQ ID NO: 184478 - DNA, 15 bp, Homo sapiens
ctcagtctgggagcc

SEQ ID NO: 184479 - DNA, 15 bp, Homo sapiens
tcagtctgggagcca

SEQ ID NO: 184480 - DNA, 15 bp, Homo sapiens
cagtctgggagccac

SEQ ID NO: 184481 - DNA, 15 bp, Homo sapiens
agtctgggagccacg

SEQ ID NO: 184482 - DNA, 15 bp, Homo sapiens
gtctgggagccacgg

SEQ ID NO: 184483 - DNA, 15 bp, Homo sapiens
tctgggagccacgga

SEQ ID NO: 184484 - DNA, 15 bp, Homo sapiens
ctgggagccacggag

SEQ ID NO: 184485 - DNA, 15 bp, Homo sapiens
tgggagccacggagg

SEQ ID NO: 184486 - DNA, 15 bp, Homo sapiens
gggagccacggaggg

SEQ ID NO: 184487 - DNA, 15 bp, Homo sapiens
ggagccacggagggc

SEQ ID NO: 184488 - DNA, 15 bp, Homo sapiens
gagccacggagggct

SEQ ID NO: 184489 - DNA, 15 bp, Homo sapiens
agccacggagggctc

SEQ ID NO: 184490 - DNA, 15 bp, Homo sapiens
gccacggagggctct

SEQ ID NO: 184491 - DNA, 15 bp, Homo sapiens
ccacggagggctctc

SEQ ID NO: 184492 - DNA, 15 bp, Homo sapiens
cacggagggctctcc

SEQ ID NO: 184493 - DNA, 15 bp, Homo sapiens
acggagggctctccc

SEQ ID NO: 184494 - DNA, 15 bp, Homo sapiens
cggagggctctcccc

SEQ ID NO: 184495 - DNA, 15 bp, Homo sapiens
ggagggctctcccct

SEQ ID NO: 184496 - DNA, 15 bp, Homo sapiens
gagggctctcccctc

SEQ ID NO: 184497 - DNA, 15 bp, Homo sapiens
agggctctcccctct

SEQ ID NO: 184498 - DNA, 15 bp, Homo sapiens
gggctctcccctctc

SEQ ID NO: 184499 - DNA, 15 bp, Homo sapiens
ggctctcccctctcc

SEQ ID NO: 184500 - DNA, 15 bp, Homo sapiens
gctctcccctctccc

SEQ ID NO: 184501 - DNA, 15 bp, Homo sapiens
ctctcccctctcccc

SEQ ID NO: 184502 - DNA, 15 bp, Homo sapiens
tctcccctctcccca

SEQ ID NO: 184503 - DNA, 15 bp, Homo sapiens
ctcccctctccccag

SEQ ID NO: 184504 - DNA, 15 bp, Homo sapiens
tcccctctccccagg

SEQ ID NO: 184505 - DNA, 15 bp, Homo sapiens
cccctctccccaggt

SEQ ID NO: 184506 - DNA, 15 bp, Homo sapiens
ccctctccccaggtt

SEQ ID NO: 184507 - DNA, 15 bp, Homo sapiens
cctctccccaggttt

SEQ ID NO: 184508 - DNA, 15 bp, Homo sapiens
ctctccccaggttta

SEQ ID NO: 184509 - DNA, 15 bp, Homo sapiens
tctccccaggtttac

SEQ ID NO: 184510 - DNA, 15 bp, Homo sapiens
ctccccaggtttacc

SEQ ID NO: 184511 - DNA, 15 bp, Homo sapiens
tccccaggtttacca

SEQ ID NO: 184512 - DNA, 15 bp, Homo sapiens
ccccaggtttaccag

SEQ ID NO: 184513 - DNA, 15 bp, Homo sapiens
cccaggtttaccagt

SEQ ID NO: 184514 - DNA, 15 bp, Homo sapiens
ccaggtttaccagtt

SEQ ID NO: 184515 - DNA, 15 bp, Homo sapiens
caggtttaccagttt

SEQ ID NO: 184516 - DNA, 15 bp, Homo sapiens
aggtttaccagtttg

SEQ ID NO: 184517 - DNA, 15 bp, Homo sapiens
ggtttaccagtttgg

SEQ ID NO: 184518 - DNA, 15 bp, Homo sapiens
gtttaccagtttggg

SEQ ID NO: 184519 - DNA, 15 bp, Homo sapiens
tttaccagtttggga

SEQ ID NO: 184520 - DNA, 15 bp, Homo sapiens
ttaccagtttgggag

SEQ ID NO: 184521 - DNA, 15 bp, Homo sapiens
taccagtttgggagg

SEQ ID NO: 184522 - DNA, 15 bp, Homo sapiens
accagtttgggaggc

SEQ ID NO: 184523 - DNA, 15 bp, Homo sapiens
ccagtttgggaggct

SEQ ID NO: 184524 - DNA, 15 bp, Homo sapiens
cagtttgggaggctt

SEQ ID NO: 184525 - DNA, 15 bp, Homo sapiens
agtttgggaggcttg

SEQ ID NO: 184526 - DNA, 15 bp, Homo sapiens
gtttgggaggcttgg

SEQ ID NO: 184527 - DNA, 15 bp, Homo sapiens
tttgggaggcttgga

SEQ ID NO: 184528 - DNA, 15 bp, Homo sapiens
ttgggaggcttggag

SEQ ID NO: 184529 - DNA, 15 bp, Homo sapiens
tgggaggcttggaga

SEQ ID NO: 184530 - DNA, 15 bp, Homo sapiens
gggaggcttggagag

SEQ ID NO: 184531 - DNA, 15 bp, Homo sapiens
ggaggcttggagaga

SEQ ID NO: 184532 - DNA, 15 bp, Homo sapiens
gaggcttggagagag

SEQ ID NO: 184533 - DNA, 15 bp, Homo sapiens
aggcttggagagagg

SEQ ID NO: 184534 - DNA, 15 bp, Homo sapiens
ggcttggagagaggc

SEQ ID NO: 184535 - DNA, 15 bp, Homo sapiens
gcttggagagaggcc

SEQ ID NO: 184536 - DNA, 15 bp, Homo sapiens
cttggagagaggcct

SEQ ID NO: 184537 - DNA, 15 bp, Homo sapiens
ttggagagaggcctg

SEQ ID NO: 184538 - DNA, 15 bp, Homo sapiens
tggagagaggcctgg

SEQ ID NO: 184539 - DNA, 15 bp, Homo sapiens
ggagagaggcctgga

SEQ ID NO: 184540 - DNA, 15 bp, Homo sapiens
gagagaggcctggag

SEQ ID NO: 184541 - DNA, 15 bp, Homo sapiens
agagaggcctggagg

SEQ ID NO: 184542 - DNA, 15 bp, Homo sapiens
gagaggcctggagga

SEQ ID NO: 184543 - DNA, 15 bp, Homo sapiens
agaggcctggaggac

SEQ ID NO: 184544 - DNA, 15 bp, Homo sapiens
gaggcctggaggacc

SEQ ID NO: 184545 - DNA, 15 bp, Homo sapiens
aggcctggaggacct

SEQ ID NO: 184546 - DNA, 15 bp, Homo sapiens
ggcctggaggacctg

SEQ ID NO: 184547 - DNA, 15 bp, Homo sapiens
gcctggaggacctgc

SEQ ID NO: 184548 - DNA, 15 bp, Homo sapiens
cctggaggacctgct

SEQ ID NO: 184549 - DNA, 15 bp, Homo sapiens
ctggaggacctgctg

SEQ ID NO: 184550 - DNA, 15 bp, Homo sapiens
tggaggacctgctgg

SEQ ID NO: 184551 - DNA, 15 bp, Homo sapiens
ggaggacctgctggg

SEQ ID NO: 184552 - DNA, 15 bp, Homo sapiens
gaggacctgctgggg

SEQ ID NO: 184553 - DNA, 15 bp, Homo sapiens
aggacctgctgggga

SEQ ID NO: 184554 - DNA, 15 bp, Homo sapiens
ggacctgctggggac

SEQ ID NO: 184555 - DNA, 15 bp, Homo sapiens
gacctgctggggact

SEQ ID NO: 184556 - DNA, 15 bp, Homo sapiens
acctgctggggacta

SEQ ID NO: 184557 - DNA, 15 bp, Homo sapiens
cctgctggggactaa

SEQ ID NO: 184558 - DNA, 15 bp, Homo sapiens
ctgctggggactaaa

SEQ ID NO: 184559 - DNA, 15 bp, Homo sapiens
tgctggggactaaag

SEQ ID NO: 184560 - DNA, 15 bp, Homo sapiens
gctggggactaaaga

SEQ ID NO: 184561 - DNA, 15 bp, Homo sapiens
ctggggactaaagaa

SEQ ID NO: 184562 - DNA, 15 bp, Homo sapiens
tggggactaaagaag

SEQ ID NO: 184563 - DNA, 15 bp, Homo sapiens
ggggactaaagaaga

SEQ ID NO: 184564 - DNA, 15 bp, Homo sapiens
gggactaaagaagag

SEQ ID NO: 184565 - DNA, 15 bp, Homo sapiens
ggactaaagaagagc

SEQ ID NO: 184566 - DNA, 15 bp, Homo sapiens
gactaaagaagagca

SEQ ID NO: 184567 - DNA, 15 bp, Homo sapiens
actaaagaagagcac

SEQ ID NO: 184568 - DNA, 15 bp, Homo sapiens
ctaaagaagagcact

SEQ ID NO: 184569 - DNA, 15 bp, Homo sapiens
taaagaagagcactg

SEQ ID NO: 184570 - DNA, 15 bp, Homo sapiens
aaagaagagcactgg

SEQ ID NO: 184571 - DNA, 15 bp, Homo sapiens
aagaagagcactggt

SEQ ID NO: 184572 - DNA, 15 bp, Homo sapiens
agaagagcactggtg

SEQ ID NO: 184573 - DNA, 15 bp, Homo sapiens
gaagagcactggtgg

SEQ ID NO: 184574 - DNA, 15 bp, Homo sapiens
aagagcactggtggg

SEQ ID NO: 184575 - DNA, 15 bp, Homo sapiens
agagcactggtggga

SEQ ID NO: 184576 - DNA, 15 bp, Homo sapiens
gagcactggtgggag

SEQ ID NO: 184577 - DNA, 15 bp, Homo sapiens
agcactggtgggagg

SEQ ID NO: 184578 - DNA, 15 bp, Homo sapiens
gcactggtgggagga

SEQ ID NO: 184579 - DNA, 15 bp, Homo sapiens
cactggtgggaggac

SEQ ID NO: 184580 - DNA, 15 bp, Homo sapiens
actggtgggaggaca

SEQ ID NO: 184581 - DNA, 15 bp, Homo sapiens
ctggtgggaggacag

SEQ ID NO: 184582 - DNA, 15 bp, Homo sapiens
tggtgggaggacagg

SEQ ID NO: 184583 - DNA, 15 bp, Homo sapiens
ggtgggaggacaggg

SEQ ID NO: 184584 - DNA, 15 bp, Homo sapiens
gtgggaggacagggc

SEQ ID NO: 184585 - DNA, 15 bp, Homo sapiens
tgggaggacagggcg

SEQ ID NO: 184586 - DNA, 15 bp, Homo sapiens
gggaggacagggcgg

SEQ ID NO: 184587 - DNA, 15 bp, Homo sapiens
ggaggacagggcggg

SEQ ID NO: 184588 - DNA, 15 bp, Homo sapiens
gaggacagggcgggg

SEQ ID NO: 184589 - DNA, 15 bp, Homo sapiens
aggacagggcggggg

SEQ ID NO: 184590 - DNA, 15 bp, Homo sapiens
ggacagggcggggga

SEQ ID NO: 184591 - DNA, 15 bp, Homo sapiens
gacagggcgggggaa

SEQ ID NO: 184592 - DNA, 15 bp, Homo sapiens
acagggcgggggaag

SEQ ID NO: 184593 - DNA, 15 bp, Homo sapiens
cagggcgggggaagg

SEQ ID NO: 184594 - DNA, 15 bp, Homo sapiens
agggcgggggaaggg

SEQ ID NO: 184595 - DNA, 15 bp, Homo sapiens
gggcgggggaagggg

SEQ ID NO: 184596 - DNA, 15 bp, Homo sapiens
ggcgggggaaggggg

SEQ ID NO: 184597 - DNA, 15 bp, Homo sapiens
gcgggggaaggggga

SEQ ID NO: 184598 - DNA, 15 bp, Homo sapiens
cgggggaagggggag

SEQ ID NO: 184599 - DNA, 15 bp, Homo sapiens
gggggaagggggagg

SEQ ID NO: 184600 - DNA, 15 bp, Homo sapiens
ggggaagggggaggg

SEQ ID NO: 184601 - DNA, 15 bp, Homo sapiens
gggaagggggagggg

SEQ ID NO: 184602 - DNA, 15 bp, Homo sapiens
ggaagggggagggga

SEQ ID NO: 184603 - DNA, 15 bp, Homo sapiens
gaagggggaggggag

SEQ ID NO: 184604 - DNA, 15 bp, Homo sapiens
aagggggaggggagt

SEQ ID NO: 184605 - DNA, 15 bp, Homo sapiens
agggggaggggagtg

SEQ ID NO: 184606 - DNA, 15 bp, Homo sapiens
gggggaggggagtga

SEQ ID NO: 184607 - DNA, 15 bp, Homo sapiens
ggggaggggagtgaa

SEQ ID NO: 184608 - DNA, 15 bp, Homo sapiens
gggaggggagtgaag

SEQ ID NO: 184609 - DNA, 15 bp, Homo sapiens
ggaggggagtgaagt

SEQ ID NO: 184610 - DNA, 15 bp, Homo sapiens
gaggggagtgaagta

SEQ ID NO: 184611 - DNA, 15 bp, Homo sapiens
aggggagtgaagtag

SEQ ID NO: 184612 - DNA, 15 bp, Homo sapiens
ggggagtgaagtagt

SEQ ID NO: 184613 - DNA, 15 bp, Homo sapiens
gggagtgaagtagtc

SEQ ID NO: 184614 - DNA, 15 bp, Homo sapiens
ggagtgaagtagtct

SEQ ID NO: 184615 - DNA, 15 bp, Homo sapiens
gagtgaagtagtctc

SEQ ID NO: 184616 - DNA, 15 bp, Homo sapiens
agtgaagtagtctcc

SEQ ID NO: 184617 - DNA, 15 bp, Homo sapiens
gtgaagtagtctccc

SEQ ID NO: 184618 - DNA, 15 bp, Homo sapiens
tgaagtagtctccct

SEQ ID NO: 184619 - DNA, 15 bp, Homo sapiens
gaagtagtctccctg

SEQ ID NO: 184620 - DNA, 15 bp, Homo sapiens
aagtagtctccctgg

SEQ ID NO: 184621 - DNA, 15 bp, Homo sapiens
agtagtctccctgga

SEQ ID NO: 184622 - DNA, 15 bp, Homo sapiens
gtagtctccctggaa

SEQ ID NO: 184623 - DNA, 15 bp, Homo sapiens
tagtctccctggaat

SEQ ID NO: 184624 - DNA, 15 bp, Homo sapiens
agtctccctggaatg

SEQ ID NO: 184625 - DNA, 15 bp, Homo sapiens
gtctccctggaatgc

SEQ ID NO: 184626 - DNA, 15 bp, Homo sapiens
tctccctggaatgct

SEQ ID NO: 184627 - DNA, 15 bp, Homo sapiens
ctccctggaatgctg

SEQ ID NO: 184628 - DNA, 15 bp, Homo sapiens
tccctggaatgctgg

SEQ ID NO: 184629 - DNA, 15 bp, Homo sapiens
ccctggaatgctggt

SEQ ID NO: 184630 - DNA, 15 bp, Homo sapiens
cctggaatgctggtg

SEQ ID NO: 184631 - DNA, 15 bp, Homo sapiens
ctggaatgctggtgg

SEQ ID NO: 184632 - DNA, 15 bp, Homo sapiens
tggaatgctggtggt

SEQ ID NO: 184633 - DNA, 15 bp, Homo sapiens
ggaatgctggtggtg

SEQ ID NO: 184634 - DNA, 15 bp, Homo sapiens
gaatgctggtggtgg

SEQ ID NO: 184635 - DNA, 15 bp, Homo sapiens
aatgctggtggtggg

SEQ ID NO: 184636 - DNA, 15 bp, Homo sapiens
atgctggtggtgggg

SEQ ID NO: 184637 - DNA, 15 bp, Homo sapiens
tgctggtggtggggg

SEQ ID NO: 184638 - DNA, 15 bp, Homo sapiens
gctggtggtggggga

SEQ ID NO: 184639 - DNA, 15 bp, Homo sapiens
ctggtggtgggggag

SEQ ID NO: 184640 - DNA, 15 bp, Homo sapiens
tggtggtgggggagg

SEQ ID NO: 184641 - DNA, 15 bp, Homo sapiens
ggtggtgggggaggc

SEQ ID NO: 184642 - DNA, 15 bp, Homo sapiens
gtggtgggggaggca

SEQ ID NO: 184643 - DNA, 15 bp, Homo sapiens
tggtgggggaggcag

SEQ ID NO: 184644 - DNA, 15 bp, Homo sapiens
ggtgggggaggcagt

SEQ ID NO: 184645 - DNA, 15 bp, Homo sapiens
gtgggggaggcagtc

SEQ ID NO: 184646 - DNA, 15 bp, Homo sapiens
tgggggaggcagtct

SEQ ID NO: 184647 - DNA, 15 bp, Homo sapiens
gggggaggcagtctc

SEQ ID NO: 184648 - DNA, 15 bp, Homo sapiens
ggggaggcagtctcc

SEQ ID NO: 184649 - DNA, 15 bp, Homo sapiens
gggaggcagtctcct

SEQ ID NO: 184650 - DNA, 15 bp, Homo sapiens
ggaggcagtctcctt

SEQ ID NO: 184651 - DNA, 15 bp, Homo sapiens
gaggcagtctccttg

SEQ ID NO: 184652 - DNA, 15 bp, Homo sapiens
aggcagtctccttgg

SEQ ID NO: 184653 - DNA, 15 bp, Homo sapiens
ggcagtctccttggt

SEQ ID NO: 184654 - DNA, 15 bp, Homo sapiens
gcagtctccttggtg

SEQ ID NO: 184655 - DNA, 15 bp, Homo sapiens
cagtctccttggtgg

SEQ ID NO: 184656 - DNA, 15 bp, Homo sapiens
agtctccttggtgga

SEQ ID NO: 184657 - DNA, 15 bp, Homo sapiens
gtctccttggtggag

SEQ ID NO: 184658 - DNA, 15 bp, Homo sapiens
tctccttggtggagg

SEQ ID NO: 184659 - DNA, 15 bp, Homo sapiens
ctccttggtggagga

SEQ ID NO: 184660 - DNA, 15 bp, Homo sapiens
tccttggtggaggag

SEQ ID NO: 184661 - DNA, 15 bp, Homo sapiens
ccttggtggaggagt

SEQ ID NO: 184662 - DNA, 15 bp, Homo sapiens
cttggtggaggagtc

SEQ ID NO: 184663 - DNA, 15 bp, Homo sapiens
ttggtggaggagtcc

SEQ ID NO: 184664 - DNA, 15 bp, Homo sapiens
tggtggaggagtccc

SEQ ID NO: 184665 - DNA, 15 bp, Homo sapiens
ggtggaggagtccca

SEQ ID NO: 184666 - DNA, 15 bp, Homo sapiens
gtggaggagtcccag

SEQ ID NO: 184667 - DNA, 15 bp, Homo sapiens
tggaggagtcccagc

SEQ ID NO: 184668 - DNA, 15 bp, Homo sapiens
ggaggagtcccagcg

SEQ ID NO: 184669 - DNA, 15 bp, Homo sapiens
gaggagtcccagcgt

SEQ ID NO: 184670 - DNA, 15 bp, Homo sapiens
aggagtcccagcgtc

SEQ ID NO: 184671 - DNA, 15 bp, Homo sapiens
ggagtcccagcgtcc

SEQ ID NO: 184672 - DNA, 15 bp, Homo sapiens
gagtcccagcgtccc

SEQ ID NO: 184673 - DNA, 15 bp, Homo sapiens
agtcccagcgtccct

SEQ ID NO: 184674 - DNA, 15 bp, Homo sapiens
gtcccagcgtccctc

SEQ ID NO: 184675 - DNA, 15 bp, Homo sapiens
tcccagcgtccctcc

SEQ ID NO: 184676 - DNA, 15 bp, Homo sapiens
cccagcgtccctccc

SEQ ID NO: 184677 - DNA, 15 bp, Homo sapiens
ccagcgtccctcccc

SEQ ID NO: 184678 - DNA, 15 bp, Homo sapiens
cagcgtccctcccct

SEQ ID NO: 184679 - DNA, 15 bp, Homo sapiens
agcgtccctcccctc

SEQ ID NO: 184680 - DNA, 15 bp, Homo sapiens
gcgtccctcccctcc

SEQ ID NO: 184681 - DNA, 15 bp, Homo sapiens
cgtccctcccctccc

SEQ ID NO: 184682 - DNA, 15 bp, Homo sapiens
gtccctcccctcccc

SEQ ID NO: 184683 - DNA, 15 bp, Homo sapiens
tccctcccctcccct

SEQ ID NO: 184684 - DNA, 15 bp, Homo sapiens
ccctcccctcccctc

SEQ ID NO: 184685 - DNA, 15 bp, Homo sapiens
cctcccctcccctcc

SEQ ID NO: 184686 - DNA, 15 bp, Homo sapiens
ctcccctcccctcct

SEQ ID NO: 184687 - DNA, 15 bp, Homo sapiens
tcccctcccctcctc

SEQ ID NO: 184688 - DNA, 15 bp, Homo sapiens
cccctcccctcctct

SEQ ID NO: 184689 - DNA, 15 bp, Homo sapiens
ccctcccctcctctg

SEQ ID NO: 184690 - DNA, 15 bp, Homo sapiens
cctcccctcctctgc

SEQ ID NO: 184691 - DNA, 15 bp, Homo sapiens
ctcccctcctctgcc

SEQ ID NO: 184692 - DNA, 15 bp, Homo sapiens
tcccctcctctgcca

SEQ ID NO: 184693 - DNA, 15 bp, Homo sapiens
cccctcctctgccaa

SEQ ID NO: 184694 - DNA, 15 bp, Homo sapiens
ccctcctctgccaac

SEQ ID NO: 184695 - DNA, 15 bp, Homo sapiens
cctcctctgccaaca

SEQ ID NO: 184696 - DNA, 15 bp, Homo sapiens
ctcctctgccaacac

SEQ ID NO: 184697 - DNA, 15 bp, Homo sapiens
tcctctgccaacaca

SEQ ID NO: 184698 - DNA, 15 bp, Homo sapiens
cctctgccaacacaa

SEQ ID NO: 184699 - DNA, 15 bp, Homo sapiens
ctctgccaacacaat

SEQ ID NO: 184700 - DNA, 15 bp, Homo sapiens
tctgccaacacaatg

SEQ ID NO: 184701 - DNA, 15 bp, Homo sapiens
ctgccaacacaatgg

SEQ ID NO: 184702 - DNA, 15 bp, Homo sapiens
tgccaacacaatgga

SEQ ID NO: 184703 - DNA, 15 bp, Homo sapiens
gccaacacaatggac

SEQ ID NO: 184704 - DNA, 15 bp, Homo sapiens
ccaacacaatggaca

SEQ ID NO: 184705 - DNA, 15 bp, Homo sapiens
caacacaatggacaa

SEQ ID NO: 184706 - DNA, 15 bp, Homo sapiens
aacacaatggacaat

SEQ ID NO: 184707 - DNA, 15 bp, Homo sapiens
acacaatggacaatg

SEQ ID NO: 184708 - DNA, 15 bp, Homo sapiens
cacaatggacaatgg

SEQ ID NO: 184709 - DNA, 15 bp, Homo sapiens
acaatggacaatggc

SEQ ID NO: 184710 - DNA, 15 bp, Homo sapiens
caatggacaatggca

SEQ ID NO: 184711 - DNA, 15 bp, Homo sapiens
aatggacaatggcaa

SEQ ID NO: 184712 - DNA, 15 bp, Homo sapiens
atggacaatggcaac

SEQ ID NO: 184713 - DNA, 15 bp, Homo sapiens
tggacaatggcaact

SEQ ID NO: 184714 - DNA, 15 bp, Homo sapiens
ggacaatggcaactg

SEQ ID NO: 184715 - DNA, 15 bp, Homo sapiens
gacaatggcaactgc

SEQ ID NO: 184716 - DNA, 15 bp, Homo sapiens
acaatggcaactgcc

SEQ ID NO: 184717 - DNA, 15 bp, Homo sapiens
caatggcaactgccc

SEQ ID NO: 184718 - DNA, 15 bp, Homo sapiens
aatggcaactgccca

SEQ ID NO: 184719 - DNA, 15 bp, Homo sapiens
atggcaactgcccac

SEQ ID NO: 184720 - DNA, 15 bp, Homo sapiens
tggcaactgcccaca

SEQ ID NO: 184721 - DNA, 15 bp, Homo sapiens
ggcaactgcccacac

SEQ ID NO: 184722 - DNA, 15 bp, Homo sapiens
gcaactgcccacaca

SEQ ID NO: 184723 - DNA, 15 bp, Homo sapiens
caactgcccacacac

SEQ ID NO: 184724 - DNA, 15 bp, Homo sapiens
aactgcccacacact

SEQ ID NO: 184725 - DNA, 15 bp, Homo sapiens
actgcccacacactc

SEQ ID NO: 184726 - DNA, 15 bp, Homo sapiens
ctgcccacacactcc

SEQ ID NO: 184727 - DNA, 15 bp, Homo sapiens
tgcccacacactccc

SEQ ID NO: 184728 - DNA, 15 bp, Homo sapiens
gcccacacactccca

SEQ ID NO: 184729 - DNA, 15 bp, Homo sapiens
cccacacactcccat

SEQ ID NO: 184730 - DNA, 15 bp, Homo sapiens
ccacacactcccatg

SEQ ID NO: 184731 - DNA, 15 bp, Homo sapiens
cacacactcccatgg

SEQ ID NO: 184732 - DNA, 15 bp, Homo sapiens
acacactcccatgga

SEQ ID NO: 184733 - DNA, 15 bp, Homo sapiens
cacactcccatggag

SEQ ID NO: 184734 - DNA, 15 bp, Homo sapiens
acactcccatggagg

SEQ ID NO: 184735 - DNA, 15 bp, Homo sapiens
cactcccatggaggg

SEQ ID NO: 184736 - DNA, 15 bp, Homo sapiens
actcccatggagggg

SEQ ID NO: 184737 - DNA, 15 bp, Homo sapiens
ctcccatggagggga

SEQ ID NO: 184738 - DNA, 15 bp, Homo sapiens
tcccatggaggggaa

SEQ ID NO: 184739 - DNA, 15 bp, Homo sapiens
cccatggaggggaag

SEQ ID NO: 184740 - DNA, 15 bp, Homo sapiens
ccatggaggggaagg

SEQ ID NO: 184741 - DNA, 15 bp, Homo sapiens
catggaggggaaggg

SEQ ID NO: 184742 - DNA, 15 bp, Homo sapiens
atggaggggaagggg

SEQ ID NO: 184743 - DNA, 15 bp, Homo sapiens
tggaggggaagggga

SEQ ID NO: 184744 - DNA, 15 bp, Homo sapiens
ggaggggaaggggat

SEQ ID NO: 184745 - DNA, 15 bp, Homo sapiens
gaggggaaggggatg

SEQ ID NO: 184746 - DNA, 15 bp, Homo sapiens
aggggaaggggatga

SEQ ID NO: 184747 - DNA, 15 bp, Homo sapiens
ggggaaggggatgag

SEQ ID NO: 184748 - DNA, 15 bp, Homo sapiens
gggaaggggatgagt

SEQ ID NO: 184749 - DNA, 15 bp, Homo sapiens
ggaaggggatgagtg

SEQ ID NO: 184750 - DNA, 15 bp, Homo sapiens
gaaggggatgagtgc

SEQ ID NO: 184751 - DNA, 15 bp, Homo sapiens
aaggggatgagtgca

SEQ ID NO: 184752 - DNA, 15 bp, Homo sapiens
aggggatgagtgcag

SEQ ID NO: 184753 - DNA, 15 bp, Homo sapiens
ggggatgagtgcagg

SEQ ID NO: 184754 - DNA, 15 bp, Homo sapiens
gggatgagtgcaggg

SEQ ID NO: 184755 - DNA, 15 bp, Homo sapiens
ggatgagtgcaggga

SEQ ID NO: 184756 - DNA, 15 bp, Homo sapiens
gatgagtgcagggaa

SEQ ID NO: 184757 - DNA, 15 bp, Homo sapiens
atgagtgcagggaac

SEQ ID NO: 184758 - DNA, 15 bp, Homo sapiens
tgagtgcagggaacc

SEQ ID NO: 184759 - DNA, 15 bp, Homo sapiens
gagtgcagggaaccc

SEQ ID NO: 184760 - DNA, 15 bp, Homo sapiens
agtgcagggaacccc

SEQ ID NO: 184761 - DNA, 15 bp, Homo sapiens
gtgcagggaaccccg

SEQ ID NO: 184762 - DNA, 15 bp, Homo sapiens
tgcagggaaccccga

SEQ ID NO: 184763 - DNA, 15 bp, Homo sapiens
gcagggaaccccgac

SEQ ID NO: 184764 - DNA, 15 bp, Homo sapiens
cagggaaccccgacc

SEQ ID NO: 184765 - DNA, 15 bp, Homo sapiens
agggaaccccgaccc

SEQ ID NO: 184766 - DNA, 15 bp, Homo sapiens
gggaaccccgacccc

SEQ ID NO: 184767 - DNA, 15 bp, Homo sapiens
ggaaccccgacccca

SEQ ID NO: 184768 - DNA, 15 bp, Homo sapiens
gaaccccgaccccac

SEQ ID NO: 184769 - DNA, 15 bp, Homo sapiens
aaccccgaccccacc

SEQ ID NO: 184770 - DNA, 15 bp, Homo sapiens
accccgaccccaccc

SEQ ID NO: 184771 - DNA, 15 bp, Homo sapiens
ccccgaccccacccg

SEQ ID NO: 184772 - DNA, 15 bp, Homo sapiens
cccgaccccacccgg

SEQ ID NO: 184773 - DNA, 15 bp, Homo sapiens
ccgaccccacccggg

SEQ ID NO: 184774 - DNA, 15 bp, Homo sapiens
cgaccccacccggga

SEQ ID NO: 184775 - DNA, 15 bp, Homo sapiens
gaccccacccgggag

SEQ ID NO: 184776 - DNA, 15 bp, Homo sapiens
accccacccgggaga

SEQ ID NO: 184777 - DNA, 15 bp, Homo sapiens
ccccacccgggagac

SEQ ID NO: 184778 - DNA, 15 bp, Homo sapiens
cccacccgggagacc

SEQ ID NO: 184779 - DNA, 15 bp, Homo sapiens
ccacccgggagacct

SEQ ID NO: 184780 - DNA, 15 bp, Homo sapiens
cacccgggagacctg

SEQ ID NO: 184781 - DNA, 15 bp, Homo sapiens
acccgggagacctgc

SEQ ID NO: 184782 - DNA, 15 bp, Homo sapiens
cccgggagacctgca

SEQ ID NO: 184783 - DNA, 15 bp, Homo sapiens
ccgggagacctgcaa

SEQ ID NO: 184784 - DNA, 15 bp, Homo sapiens
cgggagacctgcaag

SEQ ID NO: 184785 - DNA, 15 bp, Homo sapiens
gggagacctgcaagc

SEQ ID NO: 184786 - DNA, 15 bp, Homo sapiens
ggagacctgcaagcc

SEQ ID NO: 184787 - DNA, 15 bp, Homo sapiens
gagacctgcaagcct

SEQ ID NO: 184788 - DNA, 15 bp, Homo sapiens
agacctgcaagcctg

SEQ ID NO: 184789 - DNA, 15 bp, Homo sapiens
gacctgcaagcctgc

SEQ ID NO: 184790 - DNA, 15 bp, Homo sapiens
acctgcaagcctgca

SEQ ID NO: 184791 - DNA, 15 bp, Homo sapiens
cctgcaagcctgcag

SEQ ID NO: 184792 - DNA, 15 bp, Homo sapiens
ctgcaagcctgcaga

SEQ ID NO: 184793 - DNA, 15 bp, Homo sapiens
tgcaagcctgcagac

SEQ ID NO: 184794 - DNA, 15 bp, Homo sapiens
gcaagcctgcagaca

SEQ ID NO: 184795 - DNA, 15 bp, Homo sapiens
caagcctgcagacac

SEQ ID NO: 184796 - DNA, 15 bp, Homo sapiens
aagcctgcagacact

SEQ ID NO: 184797 - DNA, 15 bp, Homo sapiens
agcctgcagacactc

SEQ ID NO: 184798 - DNA, 15 bp, Homo sapiens
gcctgcagacactcc

SEQ ID NO: 184799 - DNA, 15 bp, Homo sapiens
cctgcagacactccc

SEQ ID NO: 184800 - DNA, 15 bp, Homo sapiens
ctgcagacactcccc

SEQ ID NO: 184801 - DNA, 15 bp, Homo sapiens
tgcagacactcccct

SEQ ID NO: 184802 - DNA, 15 bp, Homo sapiens
gcagacactcccctc

SEQ ID NO: 184803 - DNA, 15 bp, Homo sapiens
cagacactcccctcc

SEQ ID NO: 184804 - DNA, 15 bp, Homo sapiens
agacactcccctccc

SEQ ID NO: 184805 - DNA, 15 bp, Homo sapiens
gacactcccctcccg

SEQ ID NO: 184806 - DNA, 15 bp, Homo sapiens
acactcccctcccgc

SEQ ID NO: 184807 - DNA, 15 bp, Homo sapiens
cactcccctcccgcc

SEQ ID NO: 184808 - DNA, 15 bp, Homo sapiens
actcccctcccgccc

SEQ ID NO: 184809 - DNA, 15 bp, Homo sapiens
ctcccctcccgcccc

SEQ ID NO: 184810 - DNA, 15 bp, Homo sapiens
tcccctcccgccccc

SEQ ID NO: 184811 - DNA, 15 bp, Homo sapiens
cccctcccgccccca

SEQ ID NO: 184812 - DNA, 15 bp, Homo sapiens
ccctcccgcccccac

SEQ ID NO: 184813 - DNA, 15 bp, Homo sapiens
cctcccgcccccact

SEQ ID NO: 184814 - DNA, 15 bp, Homo sapiens
ctcccgcccccactg

SEQ ID NO: 184815 - DNA, 15 bp, Homo sapiens
tcccgcccccactga

SEQ ID NO: 184816 - DNA, 15 bp, Homo sapiens
cccgcccccactgaa

SEQ ID NO: 184817 - DNA, 15 bp, Homo sapiens
ccgcccccactgaac

SEQ ID NO: 184818 - DNA, 15 bp, Homo sapiens
cgcccccactgaacc

SEQ ID NO: 184819 - DNA, 15 bp, Homo sapiens
gcccccactgaaccc

SEQ ID NO: 184820 - DNA, 15 bp, Homo sapiens
cccccactgaaccct

SEQ ID NO: 184821 - DNA, 15 bp, Homo sapiens
ccccactgaaccctt

SEQ ID NO: 184822 - DNA, 15 bp, Homo sapiens
cccactgaacccttg

SEQ ID NO: 184823 - DNA, 15 bp, Homo sapiens
ccactgaacccttga

SEQ ID NO: 184824 - DNA, 15 bp, Homo sapiens
cactgaacccttgac

SEQ ID NO: 184825 - DNA, 15 bp, Homo sapiens
actgaacccttgacc

SEQ ID NO: 184826 - DNA, 15 bp, Homo sapiens
ctgaacccttgaccc

SEQ ID NO: 184827 - DNA, 15 bp, Homo sapiens
tgaacccttgacccc

SEQ ID NO: 184828 - DNA, 15 bp, Homo sapiens
gaacccttgacccct

SEQ ID NO: 184829 - DNA, 15 bp, Homo sapiens
aacccttgacccctg

SEQ ID NO: 184830 - DNA, 15 bp, Homo sapiens
acccttgacccctgc

SEQ ID NO: 184831 - DNA, 15 bp, Homo sapiens
cccttgacccctgcc

SEQ ID NO: 184832 - DNA, 15 bp, Homo sapiens
ccttgacccctgccc

SEQ ID NO: 184833 - DNA, 15 bp, Homo sapiens
cttgacccctgccct

SEQ ID NO: 184834 - DNA, 15 bp, Homo sapiens
ttgacccctgccctg

SEQ ID NO: 184835 - DNA, 15 bp, Homo sapiens
tgacccctgccctgc

SEQ ID NO: 184836 - DNA, 15 bp, Homo sapiens
gacccctgccctgca

SEQ ID NO: 184837 - DNA, 15 bp, Homo sapiens
acccctgccctgcag

SEQ ID NO: 184838 - DNA, 15 bp, Homo sapiens
cccctgccctgcagc

SEQ ID NO: 184839 - DNA, 15 bp, Homo sapiens
ccctgccctgcagcc

SEQ ID NO: 184840 - DNA, 15 bp, Homo sapiens
cctgccctgcagccc

SEQ ID NO: 184841 - DNA, 15 bp, Homo sapiens
ctgccctgcagcccc

SEQ ID NO: 184842 - DNA, 15 bp, Homo sapiens
tgccctgcagccccc

SEQ ID NO: 184843 - DNA, 15 bp, Homo sapiens
gccctgcagcccccg

SEQ ID NO: 184844 - DNA, 15 bp, Homo sapiens
ccctgcagcccccgc

SEQ ID NO: 184845 - DNA, 15 bp, Homo sapiens
cctgcagcccccgca

SEQ ID NO: 184846 - DNA, 15 bp, Homo sapiens
ctgcagcccccgcag

SEQ ID NO: 184847 - DNA, 15 bp, Homo sapiens
tgcagcccccgcagc

SEQ ID NO: 184848 - DNA, 15 bp, Homo sapiens
gcagcccccgcagct

SEQ ID NO: 184849 - DNA, 15 bp, Homo sapiens
cagcccccgcagctt

SEQ ID NO: 184850 - DNA, 15 bp, Homo sapiens
agcccccgcagcttg

SEQ ID NO: 184851 - DNA, 15 bp, Homo sapiens
gcccccgcagcttgc

SEQ ID NO: 184852 - DNA, 15 bp, Homo sapiens
cccccgcagcttgct

SEQ ID NO: 184853 - DNA, 15 bp, Homo sapiens
ccccgcagcttgctg

SEQ ID NO: 184854 - DNA, 15 bp, Homo sapiens
cccgcagcttgctgt

SEQ ID NO: 184855 - DNA, 15 bp, Homo sapiens
ccgcagcttgctgtt

SEQ ID NO: 184856 - DNA, 15 bp, Homo sapiens
cgcagcttgctgttt

SEQ ID NO: 184857 - DNA, 15 bp, Homo sapiens
gcagcttgctgtttg

SEQ ID NO: 184858 - DNA, 15 bp, Homo sapiens
cagcttgctgtttgc

SEQ ID NO: 184859 - DNA, 15 bp, Homo sapiens
agcttgctgtttgcc

SEQ ID NO: 184860 - DNA, 15 bp, Homo sapiens
gcttgctgtttgccc

SEQ ID NO: 184861 - DNA, 15 bp, Homo sapiens
cttgctgtttgccca

SEQ ID NO: 184862 - DNA, 15 bp, Homo sapiens
ttgctgtttgcccac

SEQ ID NO: 184863 - DNA, 15 bp, Homo sapiens
tgctgtttgcccact

SEQ ID NO: 184864 - DNA, 15 bp, Homo sapiens
gctgtttgcccactc

SEQ ID NO: 184865 - DNA, 15 bp, Homo sapiens
ctgtttgcccactct

SEQ ID NO: 184866 - DNA, 15 bp, Homo sapiens
tgtttgcccactcta

SEQ ID NO: 184867 - DNA, 15 bp, Homo sapiens
gtttgcccactctat

SEQ ID NO: 184868 - DNA, 15 bp, Homo sapiens
tttgcccactctatt

SEQ ID NO: 184869 - DNA, 15 bp, Homo sapiens
ttgcccactctattt

SEQ ID NO: 184870 - DNA, 15 bp, Homo sapiens
tgcccactctatttg

SEQ ID NO: 184871 - DNA, 15 bp, Homo sapiens
gcccactctatttgc

SEQ ID NO: 184872 - DNA, 15 bp, Homo sapiens
cccactctatttgcc

SEQ ID NO: 184873 - DNA, 15 bp, Homo sapiens
ccactctatttgccc

SEQ ID NO: 184874 - DNA, 15 bp, Homo sapiens
cactctatttgccca

SEQ ID NO: 184875 - DNA, 15 bp, Homo sapiens
actctatttgcccag

SEQ ID NO: 184876 - DNA, 15 bp, Homo sapiens
ctctatttgcccagc

SEQ ID NO: 184877 - DNA, 15 bp, Homo sapiens
tctatttgcccagcc

SEQ ID NO: 184878 - DNA, 15 bp, Homo sapiens
ctatttgcccagccc

SEQ ID NO: 184879 - DNA, 15 bp, Homo sapiens
tatttgcccagcccc

SEQ ID NO: 184880 - DNA, 15 bp, Homo sapiens
atttgcccagcccca

SEQ ID NO: 184881 - DNA, 15 bp, Homo sapiens
tttgcccagccccag

SEQ ID NO: 184882 - DNA, 15 bp, Homo sapiens
ttgcccagccccagg

SEQ ID NO: 184883 - DNA, 15 bp, Homo sapiens
tgcccagccccaggg

SEQ ID NO: 184884 - DNA, 15 bp, Homo sapiens
gcccagccccaggga

SEQ ID NO: 184885 - DNA, 15 bp, Homo sapiens
cccagccccagggac

SEQ ID NO: 184886 - DNA, 15 bp, Homo sapiens
ccagccccagggaca

SEQ ID NO: 184887 - DNA, 15 bp, Homo sapiens
cagccccagggacag

SEQ ID NO: 184888 - DNA, 15 bp, Homo sapiens
agccccagggacaga

SEQ ID NO: 184889 - DNA, 15 bp, Homo sapiens
gccccagggacagag

SEQ ID NO: 184890 - DNA, 15 bp, Homo sapiens
ccccagggacagagc

SEQ ID NO: 184891 - DNA, 15 bp, Homo sapiens
cccagggacagagct

SEQ ID NO: 184892 - DNA, 15 bp, Homo sapiens
ccagggacagagctg

SEQ ID NO: 184893 - DNA, 15 bp, Homo sapiens
cagggacagagctga

SEQ ID NO: 184894 - DNA, 15 bp, Homo sapiens
agggacagagctgat

SEQ ID NO: 184895 - DNA, 15 bp, Homo sapiens
gggacagagctgatc

SEQ ID NO: 184896 - DNA, 15 bp, Homo sapiens
ggacagagctgatcc

SEQ ID NO: 184897 - DNA, 15 bp, Homo sapiens
gacagagctgatcct

SEQ ID NO: 184898 - DNA, 15 bp, Homo sapiens
acagagctgatcctt

SEQ ID NO: 184899 - DNA, 15 bp, Homo sapiens
cagagctgatccttg

SEQ ID NO: 184900 - DNA, 15 bp, Homo sapiens
agagctgatccttga

SEQ ID NO: 184901 - DNA, 15 bp, Homo sapiens
gagctgatccttgaa

SEQ ID NO: 184902 - DNA, 15 bp, Homo sapiens
agctgatccttgaac

SEQ ID NO: 184903 - DNA, 15 bp, Homo sapiens
gctgatccttgaact

SEQ ID NO: 184904 - DNA, 15 bp, Homo sapiens
ctgatccttgaactc

SEQ ID NO: 184905 - DNA, 15 bp, Homo sapiens
tgatccttgaactct

SEQ ID NO: 184906 - DNA, 15 bp, Homo sapiens
gatccttgaactctt

SEQ ID NO: 184907 - DNA, 15 bp, Homo sapiens
atccttgaactctta

SEQ ID NO: 184908 - DNA, 15 bp, Homo sapiens
tccttgaactcttaa

SEQ ID NO: 184909 - DNA, 15 bp, Homo sapiens
ccttgaactcttaag

SEQ ID NO: 184910 - DNA, 15 bp, Homo sapiens
cttgaactcttaagt

SEQ ID NO: 184911 - DNA, 15 bp, Homo sapiens
ttgaactcttaagtt

SEQ ID NO: 184912 - DNA, 15 bp, Homo sapiens
tgaactcttaagttc

SEQ ID NO: 184913 - DNA, 15 bp, Homo sapiens
gaactcttaagttcc

SEQ ID NO: 184914 - DNA, 15 bp, Homo sapiens
aactcttaagttcca

SEQ ID NO: 184915 - DNA, 15 bp, Homo sapiens
actcttaagttccac

SEQ ID NO: 184916 - DNA, 15 bp, Homo sapiens
ctcttaagttccaca

SEQ ID NO: 184917 - DNA, 15 bp, Homo sapiens
tcttaagttccacat

SEQ ID NO: 184918 - DNA, 15 bp, Homo sapiens
cttaagttccacatt

SEQ ID NO: 184919 - DNA, 15 bp, Homo sapiens
ttaagttccacattg

SEQ ID NO: 184920 - DNA, 15 bp, Homo sapiens
taagttccacattgc

SEQ ID NO: 184921 - DNA, 15 bp, Homo sapiens
aagttccacattgcc

SEQ ID NO: 184922 - DNA, 15 bp, Homo sapiens
agttccacattgcca

SEQ ID NO: 184923 - DNA, 15 bp, Homo sapiens
gttccacattgccag

SEQ ID NO: 184924 - DNA, 15 bp, Homo sapiens
ttccacattgccagg

SEQ ID NO: 184925 - DNA, 15 bp, Homo sapiens
tccacattgccagga

SEQ ID NO: 184926 - DNA, 15 bp, Homo sapiens
ccacattgccaggac

SEQ ID NO: 184927 - DNA, 15 bp, Homo sapiens
cacattgccaggacc

SEQ ID NO: 184928 - DNA, 15 bp, Homo sapiens
acattgccaggacca

SEQ ID NO: 184929 - DNA, 15 bp, Homo sapiens
cattgccaggaccag

SEQ ID NO: 184930 - DNA, 15 bp, Homo sapiens
attgccaggaccagt

SEQ ID NO: 184931 - DNA, 15 bp, Homo sapiens
ttgccaggaccagtg

SEQ ID NO: 184932 - DNA, 15 bp, Homo sapiens
tgccaggaccagtga

SEQ ID NO: 184933 - DNA, 15 bp, Homo sapiens
gccaggaccagtgag

SEQ ID NO: 184934 - DNA, 15 bp, Homo sapiens
ccaggaccagtgagc

SEQ ID NO: 184935 - DNA, 15 bp, Homo sapiens
caggaccagtgagca

SEQ ID NO: 184936 - DNA, 15 bp, Homo sapiens
aggaccagtgagcag

SEQ ID NO: 184937 - DNA, 15 bp, Homo sapiens
ggaccagtgagcagc

SEQ ID NO: 184938 - DNA, 15 bp, Homo sapiens
gaccagtgagcagca

SEQ ID NO: 184939 - DNA, 15 bp, Homo sapiens
accagtgagcagcaa

SEQ ID NO: 184940 - DNA, 15 bp, Homo sapiens
ccagtgagcagcaac

SEQ ID NO: 184941 - DNA, 15 bp, Homo sapiens
cagtgagcagcaaca

SEQ ID NO: 184942 - DNA, 15 bp, Homo sapiens
agtgagcagcaacag

SEQ ID NO: 184943 - DNA, 15 bp, Homo sapiens
gtgagcagcaacagg

SEQ ID NO: 184944 - DNA, 15 bp, Homo sapiens
tgagcagcaacaggg

SEQ ID NO: 184945 - DNA, 15 bp, Homo sapiens
gagcagcaacagggc

SEQ ID NO: 184946 - DNA, 15 bp, Homo sapiens
agcagcaacagggcc

SEQ ID NO: 184947 - DNA, 15 bp, Homo sapiens
gcagcaacagggccg

SEQ ID NO: 184948 - DNA, 15 bp, Homo sapiens
cagcaacagggccgg

SEQ ID NO: 184949 - DNA, 15 bp, Homo sapiens
agcaacagggccggg

SEQ ID NO: 184950 - DNA, 15 bp, Homo sapiens
gcaacagggccgggg

SEQ ID NO: 184951 - DNA, 15 bp, Homo sapiens
caacagggccggggc

SEQ ID NO: 184952 - DNA, 15 bp, Homo sapiens
aacagggccggggct

SEQ ID NO: 184953 - DNA, 15 bp, Homo sapiens
acagggccggggctg

SEQ ID NO: 184954 - DNA, 15 bp, Homo sapiens
cagggccggggctgg

SEQ ID NO: 184955 - DNA, 15 bp, Homo sapiens
agggccggggctggg

SEQ ID NO: 184956 - DNA, 15 bp, Homo sapiens
gggccggggctgggc

SEQ ID NO: 184957 - DNA, 15 bp, Homo sapiens
ggccggggctgggct

SEQ ID NO: 184958 - DNA, 15 bp, Homo sapiens
gccggggctgggctt

SEQ ID NO: 184959 - DNA, 15 bp, Homo sapiens
ccggggctgggctta

SEQ ID NO: 184960 - DNA, 15 bp, Homo sapiens
cggggctgggcttat

SEQ ID NO: 184961 - DNA, 15 bp, Homo sapiens
ggggctgggcttatc

SEQ ID NO: 184962 - DNA, 15 bp, Homo sapiens
gggctgggcttatca

SEQ ID NO: 184963 - DNA, 15 bp, Homo sapiens
ggctgggcttatcag

SEQ ID NO: 184964 - DNA, 15 bp, Homo sapiens
gctgggcttatcagc

SEQ ID NO: 184965 - DNA, 15 bp, Homo sapiens
ctgggcttatcagcc

SEQ ID NO: 184966 - DNA, 15 bp, Homo sapiens
tgggcttatcagcct

SEQ ID NO: 184967 - DNA, 15 bp, Homo sapiens
gggcttatcagcctc

SEQ ID NO: 184968 - DNA, 15 bp, Homo sapiens
ggcttatcagcctcc

SEQ ID NO: 184969 - DNA, 15 bp, Homo sapiens
gcttatcagcctccc

SEQ ID NO: 184970 - DNA, 15 bp, Homo sapiens
cttatcagcctccca

SEQ ID NO: 184971 - DNA, 15 bp, Homo sapiens
ttatcagcctcccag

SEQ ID NO: 184972 - DNA, 15 bp, Homo sapiens
tatcagcctcccagc

SEQ ID NO: 184973 - DNA, 15 bp, Homo sapiens
atcagcctcccagcc

SEQ ID NO: 184974 - DNA, 15 bp, Homo sapiens
tcagcctcccagccc

SEQ ID NO: 184975 - DNA, 15 bp, Homo sapiens
cagcctcccagccca

SEQ ID NO: 184976 - DNA, 15 bp, Homo sapiens
agcctcccagcccag

SEQ ID NO: 184977 - DNA, 15 bp, Homo sapiens
gcctcccagcccaga

SEQ ID NO: 184978 - DNA, 15 bp, Homo sapiens
cctcccagcccagac

SEQ ID NO: 184979 - DNA, 15 bp, Homo sapiens
ctcccagcccagacc

SEQ ID NO: 184980 - DNA, 15 bp, Homo sapiens
tcccagcccagaccc

SEQ ID NO: 184981 - DNA, 15 bp, Homo sapiens
cccagcccagaccct

SEQ ID NO: 184982 - DNA, 15 bp, Homo sapiens
ccagcccagaccctg

SEQ ID NO: 184983 - DNA, 15 bp, Homo sapiens
cagcccagaccctgg

SEQ ID NO: 184984 - DNA, 15 bp, Homo sapiens
agcccagaccctggc

SEQ ID NO: 184985 - DNA, 15 bp, Homo sapiens
gcccagaccctggct

SEQ ID NO: 184986 - DNA, 15 bp, Homo sapiens
cccagaccctggctg

SEQ ID NO: 184987 - DNA, 15 bp, Homo sapiens
ccagaccctggctgc

SEQ ID NO: 184988 - DNA, 15 bp, Homo sapiens
cagaccctggctgca

SEQ ID NO: 184989 - DNA, 15 bp, Homo sapiens
agaccctggctgcag

SEQ ID NO: 184990 - DNA, 15 bp, Homo sapiens
gaccctggctgcaga

SEQ ID NO: 184991 - DNA, 15 bp, Homo sapiens
accctggctgcagac

SEQ ID NO: 184992 - DNA, 15 bp, Homo sapiens
ccctggctgcagaca

SEQ ID NO: 184993 - DNA, 15 bp, Homo sapiens
cctggctgcagacat

SEQ ID NO: 184994 - DNA, 15 bp, Homo sapiens
ctggctgcagacata

SEQ ID NO: 184995 - DNA, 15 bp, Homo sapiens
tggctgcagacataa

SEQ ID NO: 184996 - DNA, 15 bp, Homo sapiens
ggctgcagacataaa

SEQ ID NO: 184997 - DNA, 15 bp, Homo sapiens
gctgcagacataaat

SEQ ID NO: 184998 - DNA, 15 bp, Homo sapiens
ctgcagacataaata

SEQ ID NO: 184999 - DNA, 15 bp, Homo sapiens
tgcagacataaatag

SEQ ID NO: 185000 - DNA, 15 bp, Homo sapiens
gcagacataaatagg

SEQ ID NO: 185001 - DNA, 15 bp, Homo sapiens
cagacataaataggc

SEQ ID NO: 185002 - DNA, 15 bp, Homo sapiens
agacataaataggcc

SEQ ID NO: 185003 - DNA, 15 bp, Homo sapiens
gacataaataggccc

SEQ ID NO: 185004 - DNA, 15 bp, Homo sapiens
acataaataggccct

SEQ ID NO: 185005 - DNA, 15 bp, Homo sapiens
cataaataggccctg

SEQ ID NO: 185006 - DNA, 15 bp, Homo sapiens
ataaataggccctgc

SEQ ID NO: 185007 - DNA, 15 bp, Homo sapiens
taaataggccctgca

SEQ ID NO: 185008 - DNA, 15 bp, Homo sapiens
aaataggccctgcaa

SEQ ID NO: 185009 - DNA, 15 bp, Homo sapiens
aataggccctgcaag

SEQ ID NO: 185010 - DNA, 15 bp, Homo sapiens
ataggccctgcaaga

SEQ ID NO: 185011 - DNA, 15 bp, Homo sapiens
taggccctgcaagag

SEQ ID NO: 185012 - DNA, 15 bp, Homo sapiens
aggccctgcaagagc

SEQ ID NO: 185013 - DNA, 15 bp, Homo sapiens
ggccctgcaagagct

SEQ ID NO: 185014 - DNA, 15 bp, Homo sapiens
gccctgcaagagctg

SEQ ID NO: 185015 - DNA, 15 bp, Homo sapiens
ccctgcaagagctgg

SEQ ID NO: 185016 - DNA, 15 bp, Homo sapiens
cctgcaagagctggc

SEQ ID NO: 185017 - DNA, 15 bp, Homo sapiens
ctgcaagagctggct

SEQ ID NO: 185018 - DNA, 15 bp, Homo sapiens
tgcaagagctggctg

SEQ ID NO: 185019 - DNA, 15 bp, Homo sapiens
gcaagagctggctgc

SEQ ID NO: 185020 - DNA, 15 bp, Homo sapiens
caagagctggctgct

SEQ ID NO: 185021 - DNA, 15 bp, Homo sapiens
aagagctggctgctt

SEQ ID NO: 185022 - DNA, 15 bp, Homo sapiens
agagctggctgctta

SEQ ID NO: 185023 - DNA, 15 bp, Homo sapiens
gagctggctgcttag

SEQ ID NO: 185024 - DNA, 15 bp, Homo sapiens
agctggctgcttaga

SEQ ID NO: 185025 - DNA, 15 bp, Homo sapiens
gctggctgcttagag

SEQ ID NO: 185026 - DNA, 15 bp, Homo sapiens
ctggctgcttagaga

SEQ ID NO: 185027 - DNA, 15 bp, Homo sapiens
tggctgcttagagac

SEQ ID NO: 185028 - DNA, 15 bp, Homo sapiens
ggctgcttagagact

SEQ ID NO: 185029 - DNA, 15 bp, Homo sapiens
gctgcttagagactg

SEQ ID NO: 185030 - DNA, 15 bp, Homo sapiens
ctgcttagagactgc

SEQ ID NO: 185031 - DNA, 15 bp, Homo sapiens
tgcttagagactgcg

SEQ ID NO: 185032 - DNA, 15 bp, Homo sapiens
gcttagagactgcga

SEQ ID NO: 185033 - DNA, 15 bp, Homo sapiens
cttagagactgcgag

SEQ ID NO: 185034 - DNA, 15 bp, Homo sapiens
ttagagactgcgaga

SEQ ID NO: 185035 - DNA, 15 bp, Homo sapiens
tagagactgcgagaa

SEQ ID NO: 185036 - DNA, 15 bp, Homo sapiens
agagactgcgagaag

SEQ ID NO: 185037 - DNA, 15 bp, Homo sapiens
gagactgcgagaagg

SEQ ID NO: 185038 - DNA, 15 bp, Homo sapiens
agactgcgagaagga

SEQ ID NO: 185039 - DNA, 15 bp, Homo sapiens
gactgcgagaaggag

SEQ ID NO: 185040 - DNA, 15 bp, Homo sapiens
actgcgagaaggagg

SEQ ID NO: 185041 - DNA, 15 bp, Homo sapiens
ctgcgagaaggaggt

SEQ ID NO: 185042 - DNA, 15 bp, Homo sapiens
tgcgagaaggaggtg

SEQ ID NO: 185043 - DNA, 15 bp, Homo sapiens
gcgagaaggaggtgc

SEQ ID NO: 185044 - DNA, 15 bp, Homo sapiens
cgagaaggaggtgcg

SEQ ID NO: 185045 - DNA, 15 bp, Homo sapiens
gagaaggaggtgcgt

SEQ ID NO: 185046 - DNA, 15 bp, Homo sapiens
agaaggaggtgcgtc

SEQ ID NO: 185047 - DNA, 15 bp, Homo sapiens
gaaggaggtgcgtcc

SEQ ID NO: 185048 - DNA, 15 bp, Homo sapiens
aaggaggtgcgtcct

SEQ ID NO: 185049 - DNA, 15 bp, Homo sapiens
aggaggtgcgtcctg

SEQ ID NO: 185050 - DNA, 15 bp, Homo sapiens
ggaggtgcgtcctgc

SEQ ID NO: 185051 - DNA, 15 bp, Homo sapiens
gaggtgcgtcctgct

SEQ ID NO: 185052 - DNA, 15 bp, Homo sapiens
aggtgcgtcctgctg

SEQ ID NO: 185053 - DNA, 15 bp, Homo sapiens
ggtgcgtcctgctgc

SEQ ID NO: 185054 - DNA, 15 bp, Homo sapiens
gtgcgtcctgctgcc

SEQ ID NO: 185055 - DNA, 15 bp, Homo sapiens
tgcgtcctgctgcct

SEQ ID NO: 185056 - DNA, 15 bp, Homo sapiens
gcgtcctgctgcctg

SEQ ID NO: 185057 - DNA, 15 bp, Homo sapiens
cgtcctgctgcctgc

SEQ ID NO: 185058 - DNA, 15 bp, Homo sapiens
gtcctgctgcctgcc

SEQ ID NO: 185059 - DNA, 15 bp, Homo sapiens
tcctgctgcctgccc

SEQ ID NO: 185060 - DNA, 15 bp, Homo sapiens
cctgctgcctgcccc

SEQ ID NO: 185061 - DNA, 15 bp, Homo sapiens
ctgctgcctgccccg

SEQ ID NO: 185062 - DNA, 15 bp, Homo sapiens
tgctgcctgccccgg

SEQ ID NO: 185063 - DNA, 15 bp, Homo sapiens
gctgcctgccccggt

SEQ ID NO: 185064 - DNA, 15 bp, Homo sapiens
ctgcctgccccggtc

SEQ ID NO: 185065 - DNA, 15 bp, Homo sapiens
tgcctgccccggtca

SEQ ID NO: 185066 - DNA, 15 bp, Homo sapiens
gcctgccccggtcac

SEQ ID NO: 185067 - DNA, 15 bp, Homo sapiens
cctgccccggtcact

SEQ ID NO: 185068 - DNA, 15 bp, Homo sapiens
ctgccccggtcactc

SEQ ID NO: 185069 - DNA, 15 bp, Homo sapiens
tgccccggtcactct

SEQ ID NO: 185070 - DNA, 15 bp, Homo sapiens
gccccggtcactctg

SEQ ID NO: 185071 - DNA, 15 bp, Homo sapiens
ccccggtcactctgg

SEQ ID NO: 185072 - DNA, 15 bp, Homo sapiens
cccggtcactctggc

SEQ ID NO: 185073 - DNA, 15 bp, Homo sapiens
ccggtcactctggct

SEQ ID NO: 185074 - DNA, 15 bp, Homo sapiens
cggtcactctggctc

SEQ ID NO: 185075 - DNA, 15 bp, Homo sapiens
ggtcactctggctcc

SEQ ID NO: 185076 - DNA, 15 bp, Homo sapiens
gtcactctggctccc

SEQ ID NO: 185077 - DNA, 15 bp, Homo sapiens
tcactctggctcccc

SEQ ID NO: 185078 - DNA, 15 bp, Homo sapiens
cactctggctcccca

SEQ ID NO: 185079 - DNA, 15 bp, Homo sapiens
actctggctccccag

SEQ ID NO: 185080 - DNA, 15 bp, Homo sapiens
ctctggctccccagc

SEQ ID NO: 185081 - DNA, 15 bp, Homo sapiens
tctggctccccagct

SEQ ID NO: 185082 - DNA, 15 bp, Homo sapiens
ctggctccccagctc

SEQ ID NO: 185083 - DNA, 15 bp, Homo sapiens
tggctccccagctca

SEQ ID NO: 185084 - DNA, 15 bp, Homo sapiens
ggctccccagctcaa

SEQ ID NO: 185085 - DNA, 15 bp, Homo sapiens
gctccccagctcaag

SEQ ID NO: 185086 - DNA, 15 bp, Homo sapiens
ctccccagctcaagg

SEQ ID NO: 185087 - DNA, 15 bp, Homo sapiens
tccccagctcaaggt

SEQ ID NO: 185088 - DNA, 15 bp, Homo sapiens
ccccagctcaaggtt

SEQ ID NO: 185089 - DNA, 15 bp, Homo sapiens
cccagctcaaggttc

SEQ ID NO: 185090 - DNA, 15 bp, Homo sapiens
ccagctcaaggttca

SEQ ID NO: 185091 - DNA, 15 bp, Homo sapiens
cagctcaaggttcag

SEQ ID NO: 185092 - DNA, 15 bp, Homo sapiens
agctcaaggttcagg

SEQ ID NO: 185093 - DNA, 15 bp, Homo sapiens
gctcaaggttcaggc

SEQ ID NO: 185094 - DNA, 15 bp, Homo sapiens
ctcaaggttcaggcc

SEQ ID NO: 185095 - DNA, 15 bp, Homo sapiens
tcaaggttcaggcct

SEQ ID NO: 185096 - DNA, 15 bp, Homo sapiens
caaggttcaggcctt

SEQ ID NO: 185097 - DNA, 15 bp, Homo sapiens
aaggttcaggccttg

SEQ ID NO: 185098 - DNA, 15 bp, Homo sapiens
aggttcaggccttgc

SEQ ID NO: 185099 - DNA, 15 bp, Homo sapiens
ggttcaggccttgcc

SEQ ID NO: 185100 - DNA, 15 bp, Homo sapiens
gttcaggccttgccc

SEQ ID NO: 185101 - DNA, 15 bp, Homo sapiens
ttcaggccttgcccc

SEQ ID NO: 185102 - DNA, 15 bp, Homo sapiens
tcaggccttgcccca

SEQ ID NO: 185103 - DNA, 15 bp, Homo sapiens
caggccttgccccag

SEQ ID NO: 185104 - DNA, 15 bp, Homo sapiens
aggccttgccccagg

SEQ ID NO: 185105 - DNA, 15 bp, Homo sapiens
ggccttgccccaggc

SEQ ID NO: 185106 - DNA, 15 bp, Homo sapiens
gccttgccccaggcc

SEQ ID NO: 185107 - DNA, 15 bp, Homo sapiens
ccttgccccaggccg

SEQ ID NO: 185108 - DNA, 15 bp, Homo sapiens
cttgccccaggccgg

SEQ ID NO: 185109 - DNA, 15 bp, Homo sapiens
ttgccccaggccggg

SEQ ID NO: 185110 - DNA, 15 bp, Homo sapiens
tgccccaggccgggc

SEQ ID NO: 185111 - DNA, 15 bp, Homo sapiens
gccccaggccgggcc

SEQ ID NO: 185112 - DNA, 15 bp, Homo sapiens
ccccaggccgggcct

SEQ ID NO: 185113 - DNA, 15 bp, Homo sapiens
cccaggccgggcctc

SEQ ID NO: 185114 - DNA, 15 bp, Homo sapiens
ccaggccgggcctct

SEQ ID NO: 185115 - DNA, 15 bp, Homo sapiens
caggccgggcctctg

SEQ ID NO: 185116 - DNA, 15 bp, Homo sapiens
aggccgggcctctgg

SEQ ID NO: 185117 - DNA, 15 bp, Homo sapiens
ggccgggcctctggg

SEQ ID NO: 185118 - DNA, 15 bp, Homo sapiens
gccgggcctctgggt

SEQ ID NO: 185119 - DNA, 15 bp, Homo sapiens
ccgggcctctgggta

SEQ ID NO: 185120 - DNA, 15 bp, Homo sapiens
cgggcctctgggtac

SEQ ID NO: 185121 - DNA, 15 bp, Homo sapiens
gggcctctgggtacc

SEQ ID NO: 185122 - DNA, 15 bp, Homo sapiens
ggcctctgggtacct

SEQ ID NO: 185123 - DNA, 15 bp, Homo sapiens
gcctctgggtacctg

SEQ ID NO: 185124 - DNA, 15 bp, Homo sapiens
cctctgggtacctga

SEQ ID NO: 185125 - DNA, 15 bp, Homo sapiens
ctctgggtacctgag

SEQ ID NO: 185126 - DNA, 15 bp, Homo sapiens
tctgggtacctgagg

SEQ ID NO: 185127 - DNA, 15 bp, Homo sapiens
ctgggtacctgaggt

SEQ ID NO: 185128 - DNA, 15 bp, Homo sapiens
tgggtacctgaggtc

SEQ ID NO: 185129 - DNA, 15 bp, Homo sapiens
gggtacctgaggtct

SEQ ID NO: 185130 - DNA, 15 bp, Homo sapiens
ggtacctgaggtctt

SEQ ID NO: 185131 - DNA, 15 bp, Homo sapiens
gtacctgaggtcttc

SEQ ID NO: 185132 - DNA, 15 bp, Homo sapiens
tacctgaggtcttct

SEQ ID NO: 185133 - DNA, 15 bp, Homo sapiens
acctgaggtcttctc

SEQ ID NO: 185134 - DNA, 15 bp, Homo sapiens
cctgaggtcttctcc

SEQ ID NO: 185135 - DNA, 15 bp, Homo sapiens
ctgaggtcttctccc

SEQ ID NO: 185136 - DNA, 15 bp, Homo sapiens
tgaggtcttctcccg

SEQ ID NO: 185137 - DNA, 15 bp, Homo sapiens
gaggtcttctcccgc

SEQ ID NO: 185138 - DNA, 15 bp, Homo sapiens
aggtcttctcccgct

SEQ ID NO: 185139 - DNA, 15 bp, Homo sapiens
ggtcttctcccgctc

SEQ ID NO: 185140 - DNA, 15 bp, Homo sapiens
gtcttctcccgctct

SEQ ID NO: 185141 - DNA, 15 bp, Homo sapiens
tcttctcccgctctg

SEQ ID NO: 185142 - DNA, 15 bp, Homo sapiens
cttctcccgctctgt

SEQ ID NO: 185143 - DNA, 15 bp, Homo sapiens
ttctcccgctctgtg

SEQ ID NO: 185144 - DNA, 15 bp, Homo sapiens
tctcccgctctgtgc

SEQ ID NO: 185145 - DNA, 15 bp, Homo sapiens
ctcccgctctgtgcc

SEQ ID NO: 185146 - DNA, 15 bp, Homo sapiens
tcccgctctgtgccc

SEQ ID NO: 185147 - DNA, 15 bp, Homo sapiens
cccgctctgtgccct

SEQ ID NO: 185148 - DNA, 15 bp, Homo sapiens
ccgctctgtgccctt

SEQ ID NO: 185149 - DNA, 15 bp, Homo sapiens
cgctctgtgcccttc

SEQ ID NO: 185150 - DNA, 15 bp, Homo sapiens
gctctgtgcccttct

SEQ ID NO: 185151 - DNA, 15 bp, Homo sapiens
ctctgtgcccttctc

SEQ ID NO: 185152 - DNA, 15 bp, Homo sapiens
tctgtgcccttctcc

SEQ ID NO: 185153 - DNA, 15 bp, Homo sapiens
ctgtgcccttctcct

SEQ ID NO: 185154 - DNA, 15 bp, Homo sapiens
tgtgcccttctcctc

SEQ ID NO: 185155 - DNA, 15 bp, Homo sapiens
gtgcccttctcctca

SEQ ID NO: 185156 - DNA, 15 bp, Homo sapiens
tgcccttctcctcac

SEQ ID NO: 185157 - DNA, 15 bp, Homo sapiens
gcccttctcctcacc

SEQ ID NO: 185158 - DNA, 15 bp, Homo sapiens
cccttctcctcacct

SEQ ID NO: 185159 - DNA, 15 bp, Homo sapiens
ccttctcctcacctg

SEQ ID NO: 185160 - DNA, 15 bp, Homo sapiens
cttctcctcacctgg

SEQ ID NO: 185161 - DNA, 15 bp, Homo sapiens
ttctcctcacctggc

SEQ ID NO: 185162 - DNA, 15 bp, Homo sapiens
tctcctcacctggct

SEQ ID NO: 185163 - DNA, 15 bp, Homo sapiens
ctcctcacctggctg

SEQ ID NO: 185164 - DNA, 15 bp, Homo sapiens
tcctcacctggctgc

SEQ ID NO: 185165 - DNA, 15 bp, Homo sapiens
cctcacctggctgca

SEQ ID NO: 185166 - DNA, 15 bp, Homo sapiens
ctcacctggctgcaa

SEQ ID NO: 185167 - DNA, 15 bp, Homo sapiens
tcacctggctgcaat

SEQ ID NO: 185168 - DNA, 15 bp, Homo sapiens
cacctggctgcaatg

SEQ ID NO: 185169 - DNA, 15 bp, Homo sapiens
acctggctgcaatga

SEQ ID NO: 185170 - DNA, 15 bp, Homo sapiens
cctggctgcaatgag

SEQ ID NO: 185171 - DNA, 15 bp, Homo sapiens
ctggctgcaatgagt

SEQ ID NO: 185172 - DNA, 15 bp, Homo sapiens
tggctgcaatgagtg

SEQ ID NO: 185173 - DNA, 15 bp, Homo sapiens
ggctgcaatgagtgg

SEQ ID NO: 185174 - DNA, 15 bp, Homo sapiens
gctgcaatgagtggg

SEQ ID NO: 185175 - DNA, 15 bp, Homo sapiens
ctgcaatgagtgggg

SEQ ID NO: 185176 - DNA, 15 bp, Homo sapiens
tgcaatgagtggggg

SEQ ID NO: 185177 - DNA, 15 bp, Homo sapiens
gcaatgagtggggga

SEQ ID NO: 185178 - DNA, 15 bp, Homo sapiens
caatgagtgggggag

SEQ ID NO: 185179 - DNA, 15 bp, Homo sapiens
aatgagtgggggagc

SEQ ID NO: 185180 - DNA, 15 bp, Homo sapiens
atgagtgggggagca

SEQ ID NO: 185181 - DNA, 15 bp, Homo sapiens
tgagtgggggagcac

SEQ ID NO: 185182 - DNA, 15 bp, Homo sapiens
gagtgggggagcacg

SEQ ID NO: 185183 - DNA, 15 bp, Homo sapiens
agtgggggagcacgg

SEQ ID NO: 185184 - DNA, 15 bp, Homo sapiens
gtgggggagcacggg

SEQ ID NO: 185185 - DNA, 15 bp, Homo sapiens
tgggggagcacgggg

SEQ ID NO: 185186 - DNA, 15 bp, Homo sapiens
gggggagcacggggc

SEQ ID NO: 185187 - DNA, 15 bp, Homo sapiens
ggggagcacggggct

SEQ ID NO: 185188 - DNA, 15 bp, Homo sapiens
gggagcacggggctt

SEQ ID NO: 185189 - DNA, 15 bp, Homo sapiens
ggagcacggggcttc

SEQ ID NO: 185190 - DNA, 15 bp, Homo sapiens
gagcacggggcttct

SEQ ID NO: 185191 - DNA, 15 bp, Homo sapiens
agcacggggcttctg

SEQ ID NO: 185192 - DNA, 15 bp, Homo sapiens
gcacggggcttctgc

SEQ ID NO: 185193 - DNA, 15 bp, Homo sapiens
cacggggcttctgca

SEQ ID NO: 185194 - DNA, 15 bp, Homo sapiens
acggggcttctgcat

SEQ ID NO: 185195 - DNA, 15 bp, Homo sapiens
cggggcttctgcatg

SEQ ID NO: 185196 - DNA, 15 bp, Homo sapiens
ggggcttctgcatgc

SEQ ID NO: 185197 - DNA, 15 bp, Homo sapiens
gggcttctgcatgct

SEQ ID NO: 185198 - DNA, 15 bp, Homo sapiens
ggcttctgcatgctg

SEQ ID NO: 185199 - DNA, 15 bp, Homo sapiens
gcttctgcatgctga

SEQ ID NO: 185200 - DNA, 15 bp, Homo sapiens
cttctgcatgctgaa

SEQ ID NO: 185201 - DNA, 15 bp, Homo sapiens
ttctgcatgctgaag

SEQ ID NO: 185202 - DNA, 15 bp, Homo sapiens
tctgcatgctgaagg

SEQ ID NO: 185203 - DNA, 15 bp, Homo sapiens
ctgcatgctgaaggc

SEQ ID NO: 185204 - DNA, 15 bp, Homo sapiens
tgcatgctgaaggca

SEQ ID NO: 185205 - DNA, 15 bp, Homo sapiens
gcatgctgaaggcac

SEQ ID NO: 185206 - DNA, 15 bp, Homo sapiens
catgctgaaggcacc

SEQ ID NO: 185207 - DNA, 15 bp, Homo sapiens
atgctgaaggcaccc

SEQ ID NO: 185208 - DNA, 15 bp, Homo sapiens
tgctgaaggcacccc

SEQ ID NO: 185209 - DNA, 15 bp, Homo sapiens
gctgaaggcacccca

SEQ ID NO: 185210 - DNA, 15 bp, Homo sapiens
ctgaaggcaccccac

SEQ ID NO: 185211 - DNA, 15 bp, Homo sapiens
tgaaggcaccccact

SEQ ID NO: 185212 - DNA, 15 bp, Homo sapiens
gaaggcaccccactc

SEQ ID NO: 185213 - DNA, 15 bp, Homo sapiens
aaggcaccccactca

SEQ ID NO: 185214 - DNA, 15 bp, Homo sapiens
aggcaccccactcag

SEQ ID NO: 185215 - DNA, 15 bp, Homo sapiens
ggcaccccactcagc

SEQ ID NO: 185216 - DNA, 15 bp, Homo sapiens
gcaccccactcagcc

SEQ ID NO: 185217 - DNA, 15 bp, Homo sapiens
caccccactcagcca

SEQ ID NO: 185218 - DNA, 15 bp, Homo sapiens
accccactcagccag

SEQ ID NO: 185219 - DNA, 15 bp, Homo sapiens
ccccactcagccagg

SEQ ID NO: 185220 - DNA, 15 bp, Homo sapiens
cccactcagccaggc

SEQ ID NO: 185221 - DNA, 15 bp, Homo sapiens
ccactcagccaggcc

SEQ ID NO: 185222 - DNA, 15 bp, Homo sapiens
cactcagccaggccc

SEQ ID NO: 185223 - DNA, 15 bp, Homo sapiens
actcagccaggccct

SEQ ID NO: 185224 - DNA, 15 bp, Homo sapiens
ctcagccaggccctt

SEQ ID NO: 185225 - DNA, 15 bp, Homo sapiens
tcagccaggcccttc

SEQ ID NO: 185226 - DNA, 15 bp, Homo sapiens
cagccaggcccttct

SEQ ID NO: 185227 - DNA, 15 bp, Homo sapiens
agccaggcccttctt

SEQ ID NO: 185228 - DNA, 15 bp, Homo sapiens
gccaggcccttcttc

SEQ ID NO: 185229 - DNA, 15 bp, Homo sapiens
ccaggcccttcttct

SEQ ID NO: 185230 - DNA, 15 bp, Homo sapiens
caggcccttcttctc

SEQ ID NO: 185231 - DNA, 15 bp, Homo sapiens
aggcccttcttctcc

SEQ ID NO: 185232 - DNA, 15 bp, Homo sapiens
ggcccttcttctcct

SEQ ID NO: 185233 - DNA, 15 bp, Homo sapiens
gcccttcttctcctc

SEQ ID NO: 185234 - DNA, 15 bp, Homo sapiens
cccttcttctcctcc

SEQ ID NO: 185235 - DNA, 15 bp, Homo sapiens
ccttcttctcctcca

SEQ ID NO: 185236 - DNA, 15 bp, Homo sapiens
cttcttctcctccag

SEQ ID NO: 185237 - DNA, 15 bp, Homo sapiens
ttcttctcctccagg

SEQ ID NO: 185238 - DNA, 15 bp, Homo sapiens
tcttctcctccaggt

SEQ ID NO: 185239 - DNA, 15 bp, Homo sapiens
cttctcctccaggtc

SEQ ID NO: 185240 - DNA, 15 bp, Homo sapiens
ttctcctccaggtcc

SEQ ID NO: 185241 - DNA, 15 bp, Homo sapiens
tctcctccaggtccc

SEQ ID NO: 185242 - DNA, 15 bp, Homo sapiens
ctcctccaggtcccc

SEQ ID NO: 185243 - DNA, 15 bp, Homo sapiens
tcctccaggtccccc

SEQ ID NO: 185244 - DNA, 15 bp, Homo sapiens
cctccaggtccccca

SEQ ID NO: 185245 - DNA, 15 bp, Homo sapiens
ctccaggtcccccac

SEQ ID NO: 185246 - DNA, 15 bp, Homo sapiens
tccaggtcccccacg

SEQ ID NO: 185247 - DNA, 15 bp, Homo sapiens
ccaggtcccccacgg

SEQ ID NO: 185248 - DNA, 15 bp, Homo sapiens
caggtcccccacggc

SEQ ID NO: 185249 - DNA, 15 bp, Homo sapiens
aggtcccccacggcc

SEQ ID NO: 185250 - DNA, 15 bp, Homo sapiens
ggtcccccacggccc

SEQ ID NO: 185251 - DNA, 15 bp, Homo sapiens
gtcccccacggccct

SEQ ID NO: 185252 - DNA, 15 bp, Homo sapiens
tcccccacggccctt

SEQ ID NO: 185253 - DNA, 15 bp, Homo sapiens
cccccacggcccttc

SEQ ID NO: 185254 - DNA, 15 bp, Homo sapiens
ccccacggcccttca

SEQ ID NO: 185255 - DNA, 15 bp, Homo sapiens
cccacggcccttcag

SEQ ID NO: 185256 - DNA, 15 bp, Homo sapiens
ccacggcccttcagg

SEQ ID NO: 185257 - DNA, 15 bp, Homo sapiens
cacggcccttcagga

SEQ ID NO: 185258 - DNA, 15 bp, Homo sapiens
acggcccttcaggat

SEQ ID NO: 185259 - DNA, 15 bp, Homo sapiens
cggcccttcaggatg

SEQ ID NO: 185260 - DNA, 15 bp, Homo sapiens
ggcccttcaggatga

SEQ ID NO: 185261 - DNA, 15 bp, Homo sapiens
gcccttcaggatgaa

SEQ ID NO: 185262 - DNA, 15 bp, Homo sapiens
cccttcaggatgaaa

SEQ ID NO: 185263 - DNA, 15 bp, Homo sapiens
ccttcaggatgaaag

SEQ ID NO: 185264 - DNA, 15 bp, Homo sapiens
cttcaggatgaaagc

SEQ ID NO: 185265 - DNA, 15 bp, Homo sapiens
ttcaggatgaaagct

SEQ ID NO: 185266 - DNA, 15 bp, Homo sapiens
tcaggatgaaagctg

SEQ ID NO: 185267 - DNA, 15 bp, Homo sapiens
caggatgaaagctgc

SEQ ID NO: 185268 - DNA, 15 bp, Homo sapiens
aggatgaaagctgcg

SEQ ID NO: 185269 - DNA, 15 bp, Homo sapiens
ggatgaaagctgcgg

SEQ ID NO: 185270 - DNA, 15 bp, Homo sapiens
gatgaaagctgcggt

SEQ ID NO: 185271 - DNA, 15 bp, Homo sapiens
atgaaagctgcggtg

SEQ ID NO: 185272 - DNA, 15 bp, Homo sapiens
tgaaagctgcggtgc

SEQ ID NO: 185273 - DNA, 15 bp, Homo sapiens
gaaagctgcggtgct

SEQ ID NO: 185274 - DNA, 15 bp, Homo sapiens
aaagctgcggtgctg

SEQ ID NO: 185275 - DNA, 15 bp, Homo sapiens
aagctgcggtgctga

SEQ ID NO: 185276 - DNA, 15 bp, Homo sapiens
agctgcggtgctgac

SEQ ID NO: 185277 - DNA, 15 bp, Homo sapiens
gctgcggtgctgacc

SEQ ID NO: 185278 - DNA, 15 bp, Homo sapiens
ctgcggtgctgacct

SEQ ID NO: 185279 - DNA, 15 bp, Homo sapiens
tgcggtgctgacctt

SEQ ID NO: 185280 - DNA, 15 bp, Homo sapiens
gcggtgctgaccttg

SEQ ID NO: 185281 - DNA, 15 bp, Homo sapiens
cggtgctgaccttgg

SEQ ID NO: 185282 - DNA, 15 bp, Homo sapiens
ggtgctgaccttggc

SEQ ID NO: 185283 - DNA, 15 bp, Homo sapiens
gtgctgaccttggcc

SEQ ID NO: 185284 - DNA, 15 bp, Homo sapiens
tgctgaccttggccg

SEQ ID NO: 185285 - DNA, 15 bp, Homo sapiens
gctgaccttggccgt

SEQ ID NO: 185286 - DNA, 15 bp, Homo sapiens
ctgaccttggccgtg

SEQ ID NO: 185287 - DNA, 15 bp, Homo sapiens
tgaccttggccgtgc

SEQ ID NO: 185288 - DNA, 15 bp, Homo sapiens
gaccttggccgtgct

SEQ ID NO: 185289 - DNA, 15 bp, Homo sapiens
accttggccgtgctc

SEQ ID NO: 185290 - DNA, 15 bp, Homo sapiens
ccttggccgtgctct

SEQ ID NO: 185291 - DNA, 15 bp, Homo sapiens
cttggccgtgctctt

SEQ ID NO: 185292 - DNA, 15 bp, Homo sapiens
ttggccgtgctcttc

SEQ ID NO: 185293 - DNA, 15 bp, Homo sapiens
tggccgtgctcttcc

SEQ ID NO: 185294 - DNA, 15 bp, Homo sapiens
ggccgtgctcttcct

SEQ ID NO: 185295 - DNA, 15 bp, Homo sapiens
gccgtgctcttcctg

SEQ ID NO: 185296 - DNA, 15 bp, Homo sapiens
ccgtgctcttcctga

SEQ ID NO: 185297 - DNA, 15 bp, Homo sapiens
cgtgctcttcctgac

SEQ ID NO: 185298 - DNA, 15 bp, Homo sapiens
gtgctcttcctgacg

SEQ ID NO: 185299 - DNA, 15 bp, Homo sapiens
tgctcttcctgacgg

SEQ ID NO: 185300 - DNA, 15 bp, Homo sapiens
gctcttcctgacggg

SEQ ID NO: 185301 - DNA, 15 bp, Homo sapiens
ctcttcctgacgggt

SEQ ID NO: 185302 - DNA, 15 bp, Homo sapiens
tcttcctgacgggta

SEQ ID NO: 185303 - DNA, 15 bp, Homo sapiens
cttcctgacgggtag

SEQ ID NO: 185304 - DNA, 15 bp, Homo sapiens
ttcctgacgggtagg

SEQ ID NO: 185305 - DNA, 15 bp, Homo sapiens
tcctgacgggtaggt

SEQ ID NO: 185306 - DNA, 15 bp, Homo sapiens
cctgacgggtaggtg

SEQ ID NO: 185307 - DNA, 15 bp, Homo sapiens
ctgacgggtaggtgt

SEQ ID NO: 185308 - DNA, 15 bp, Homo sapiens
tgacgggtaggtgtc

SEQ ID NO: 185309 - DNA, 15 bp, Homo sapiens
gacgggtaggtgtcc

SEQ ID NO: 185310 - DNA, 15 bp, Homo sapiens
acgggtaggtgtccc

SEQ ID NO: 185311 - DNA, 15 bp, Homo sapiens
cgggtaggtgtcccc

SEQ ID NO: 185312 - DNA, 15 bp, Homo sapiens
gggtaggtgtcccct

SEQ ID NO: 185313 - DNA, 15 bp, Homo sapiens
ggtaggtgtccccta

SEQ ID NO: 185314 - DNA, 15 bp, Homo sapiens
gtaggtgtcccctaa

SEQ ID NO: 185315 - DNA, 15 bp, Homo sapiens
taggtgtcccctaac

SEQ ID NO: 185316 - DNA, 15 bp, Homo sapiens
aggtgtcccctaacc

SEQ ID NO: 185317 - DNA, 15 bp, Homo sapiens
ggtgtcccctaacct

SEQ ID NO: 185318 - DNA, 15 bp, Homo sapiens
gtgtcccctaaccta

SEQ ID NO: 185319 - DNA, 15 bp, Homo sapiens
tgtcccctaacctag

SEQ ID NO: 185320 - DNA, 15 bp, Homo sapiens
gtcccctaacctagg

SEQ ID NO: 185321 - DNA, 15 bp, Homo sapiens
tcccctaacctaggg

SEQ ID NO: 185322 - DNA, 15 bp, Homo sapiens
cccctaacctaggga

SEQ ID NO: 185323 - DNA, 15 bp, Homo sapiens
ccctaacctagggag

SEQ ID NO: 185324 - DNA, 15 bp, Homo sapiens
cctaacctagggagc

SEQ ID NO: 185325 - DNA, 15 bp, Homo sapiens
ctaacctagggagcc

SEQ ID NO: 185326 - DNA, 15 bp, Homo sapiens
taacctagggagcca

SEQ ID NO: 185327 - DNA, 15 bp, Homo sapiens
aacctagggagccaa

SEQ ID NO: 185328 - DNA, 15 bp, Homo sapiens
acctagggagccaac

SEQ ID NO: 185329 - DNA, 15 bp, Homo sapiens
cctagggagccaacc

SEQ ID NO: 185330 - DNA, 15 bp, Homo sapiens
ctagggagccaacca

SEQ ID NO: 185331 - DNA, 15 bp, Homo sapiens
tagggagccaaccat

SEQ ID NO: 185332 - DNA, 15 bp, Homo sapiens
agggagccaaccatc

SEQ ID NO: 185333 - DNA, 15 bp, Homo sapiens
gggagccaaccatcg

SEQ ID NO: 185334 - DNA, 15 bp, Homo sapiens
ggagccaaccatcgg

SEQ ID NO: 185335 - DNA, 15 bp, Homo sapiens
gagccaaccatcggg

SEQ ID NO: 185336 - DNA, 15 bp, Homo sapiens
agccaaccatcgggg

SEQ ID NO: 185337 - DNA, 15 bp, Homo sapiens
gccaaccatcggggg

SEQ ID NO: 185338 - DNA, 15 bp, Homo sapiens
ccaaccatcgggggg

SEQ ID NO: 185339 - DNA, 15 bp, Homo sapiens
caaccatcggggggc

SEQ ID NO: 185340 - DNA, 15 bp, Homo sapiens
aaccatcggggggct

SEQ ID NO: 185341 - DNA, 15 bp, Homo sapiens
accatcggggggctt

SEQ ID NO: 185342 - DNA, 15 bp, Homo sapiens
ccatcggggggcttt

SEQ ID NO: 185343 - DNA, 15 bp, Homo sapiens
catcggggggctttc

SEQ ID NO: 185344 - DNA, 15 bp, Homo sapiens
atcggggggctttct

SEQ ID NO: 185345 - DNA, 15 bp, Homo sapiens
tcggggggctttctc

SEQ ID NO: 185346 - DNA, 15 bp, Homo sapiens
cggggggctttctcc

SEQ ID NO: 185347 - DNA, 15 bp, Homo sapiens
ggggggctttctccc

SEQ ID NO: 185348 - DNA, 15 bp, Homo sapiens
gggggctttctccct

SEQ ID NO: 185349 - DNA, 15 bp, Homo sapiens
ggggctttctcccta

SEQ ID NO: 185350 - DNA, 15 bp, Homo sapiens
gggctttctccctaa

SEQ ID NO: 185351 - DNA, 15 bp, Homo sapiens
ggctttctccctaaa

SEQ ID NO: 185352 - DNA, 15 bp, Homo sapiens
gctttctccctaaat

SEQ ID NO: 185353 - DNA, 15 bp, Homo sapiens
ctttctccctaaatc

SEQ ID NO: 185354 - DNA, 15 bp, Homo sapiens
tttctccctaaatcc

SEQ ID NO: 185355 - DNA, 15 bp, Homo sapiens
ttctccctaaatccc

SEQ ID NO: 185356 - DNA, 15 bp, Homo sapiens
tctccctaaatcccc

SEQ ID NO: 185357 - DNA, 15 bp, Homo sapiens
ctccctaaatccccg

SEQ ID NO: 185358 - DNA, 15 bp, Homo sapiens
tccctaaatccccgt

SEQ ID NO: 185359 - DNA, 15 bp, Homo sapiens
ccctaaatccccgtg

SEQ ID NO: 185360 - DNA, 15 bp, Homo sapiens
cctaaatccccgtgg

SEQ ID NO: 185361 - DNA, 15 bp, Homo sapiens
ctaaatccccgtggc

SEQ ID NO: 185362 - DNA, 15 bp, Homo sapiens
taaatccccgtggcc

SEQ ID NO: 185363 - DNA, 15 bp, Homo sapiens
aaatccccgtggccc

SEQ ID NO: 185364 - DNA, 15 bp, Homo sapiens
aatccccgtggccca

SEQ ID NO: 185365 - DNA, 15 bp, Homo sapiens
atccccgtggcccac

SEQ ID NO: 185366 - DNA, 15 bp, Homo sapiens
tccccgtggcccacc

SEQ ID NO: 185367 - DNA, 15 bp, Homo sapiens
ccccgtggcccaccc

SEQ ID NO: 185368 - DNA, 15 bp, Homo sapiens
cccgtggcccaccct

SEQ ID NO: 185369 - DNA, 15 bp, Homo sapiens
ccgtggcccaccctc

SEQ ID NO: 185370 - DNA, 15 bp, Homo sapiens
cgtggcccaccctcc

SEQ ID NO: 185371 - DNA, 15 bp, Homo sapiens
gtggcccaccctcct

SEQ ID NO: 185372 - DNA, 15 bp, Homo sapiens
tggcccaccctcctg

SEQ ID NO: 185373 - DNA, 15 bp, Homo sapiens
ggcccaccctcctgg

SEQ ID NO: 185374 - DNA, 15 bp, Homo sapiens
gcccaccctcctggg

SEQ ID NO: 185375 - DNA, 15 bp, Homo sapiens
cccaccctcctgggc

SEQ ID NO: 185376 - DNA, 15 bp, Homo sapiens
ccaccctcctgggca

SEQ ID NO: 185377 - DNA, 15 bp, Homo sapiens
caccctcctgggcag

SEQ ID NO: 185378 - DNA, 15 bp, Homo sapiens
accctcctgggcaga

SEQ ID NO: 185379 - DNA, 15 bp, Homo sapiens
ccctcctgggcagag

SEQ ID NO: 185380 - DNA, 15 bp, Homo sapiens
cctcctgggcagagg

SEQ ID NO: 185381 - DNA, 15 bp, Homo sapiens
ctcctgggcagaggc

SEQ ID NO: 185382 - DNA, 15 bp, Homo sapiens
tcctgggcagaggca

SEQ ID NO: 185383 - DNA, 15 bp, Homo sapiens
cctgggcagaggcag

SEQ ID NO: 185384 - DNA, 15 bp, Homo sapiens
ctgggcagaggcagc

SEQ ID NO: 185385 - DNA, 15 bp, Homo sapiens
tgggcagaggcagca

SEQ ID NO: 185386 - DNA, 15 bp, Homo sapiens
gggcagaggcagcag

SEQ ID NO: 185387 - DNA, 15 bp, Homo sapiens
ggcagaggcagcagg

SEQ ID NO: 185388 - DNA, 15 bp, Homo sapiens
gcagaggcagcaggt

SEQ ID NO: 185389 - DNA, 15 bp, Homo sapiens
cagaggcagcaggtt

SEQ ID NO: 185390 - DNA, 15 bp, Homo sapiens
agaggcagcaggttt

SEQ ID NO: 185391 - DNA, 15 bp, Homo sapiens
gaggcagcaggtttc

SEQ ID NO: 185392 - DNA, 15 bp, Homo sapiens
aggcagcaggtttct

SEQ ID NO: 185393 - DNA, 15 bp, Homo sapiens
ggcagcaggtttctc

SEQ ID NO: 185394 - DNA, 15 bp, Homo sapiens
gcagcaggtttctca

SEQ ID NO: 185395 - DNA, 15 bp, Homo sapiens
cagcaggtttctcac

SEQ ID NO: 185396 - DNA, 15 bp, Homo sapiens
agcaggtttctcact

SEQ ID NO: 185397 - DNA, 15 bp, Homo sapiens
gcaggtttctcactg

SEQ ID NO: 185398 - DNA, 15 bp, Homo sapiens
caggtttctcactgg

SEQ ID NO: 185399 - DNA, 15 bp, Homo sapiens
aggtttctcactggc

SEQ ID NO: 185400 - DNA, 15 bp, Homo sapiens
ggtttctcactggcc

SEQ ID NO: 185401 - DNA, 15 bp, Homo sapiens
gtttctcactggccc

SEQ ID NO: 185402 - DNA, 15 bp, Homo sapiens
tttctcactggcccc

SEQ ID NO: 185403 - DNA, 15 bp, Homo sapiens
ttctcactggccccc

SEQ ID NO: 185404 - DNA, 15 bp, Homo sapiens
tctcactggccccct

SEQ ID NO: 185405 - DNA, 15 bp, Homo sapiens
ctcactggccccctc

SEQ ID NO: 185406 - DNA, 15 bp, Homo sapiens
tcactggccccctct

SEQ ID NO: 185407 - DNA, 15 bp, Homo sapiens
cactggccccctctc

SEQ ID NO: 185408 - DNA, 15 bp, Homo sapiens
actggccccctctcc

SEQ ID NO: 185409 - DNA, 15 bp, Homo sapiens
ctggccccctctccc

SEQ ID NO: 185410 - DNA, 15 bp, Homo sapiens
tggccccctctcccc

SEQ ID NO: 185411 - DNA, 15 bp, Homo sapiens
ggccccctctccccc

SEQ ID NO: 185412 - DNA, 15 bp, Homo sapiens
gccccctctccccca

SEQ ID NO: 185413 - DNA, 15 bp, Homo sapiens
ccccctctcccccac

SEQ ID NO: 185414 - DNA, 15 bp, Homo sapiens
cccctctcccccacc

SEQ ID NO: 185415 - DNA, 15 bp, Homo sapiens
ccctctcccccacct

SEQ ID NO: 185416 - DNA, 15 bp, Homo sapiens
cctctcccccacctc

SEQ ID NO: 185417 - DNA, 15 bp, Homo sapiens
ctctcccccacctcc

SEQ ID NO: 185418 - DNA, 15 bp, Homo sapiens
tctcccccacctcca

SEQ ID NO: 185419 - DNA, 15 bp, Homo sapiens
ctcccccacctccaa

SEQ ID NO: 185420 - DNA, 15 bp, Homo sapiens
tcccccacctccaag

SEQ ID NO: 185421 - DNA, 15 bp, Homo sapiens
cccccacctccaagc

SEQ ID NO: 185422 - DNA, 15 bp, Homo sapiens
ccccacctccaagct

SEQ ID NO: 185423 - DNA, 15 bp, Homo sapiens
cccacctccaagctt

SEQ ID NO: 185424 - DNA, 15 bp, Homo sapiens
ccacctccaagcttg

SEQ ID NO: 185425 - DNA, 15 bp, Homo sapiens
cacctccaagcttgg

SEQ ID NO: 185426 - DNA, 15 bp, Homo sapiens
acctccaagcttggc

SEQ ID NO: 185427 - DNA, 15 bp, Homo sapiens
cctccaagcttggcc

SEQ ID NO: 185428 - DNA, 15 bp, Homo sapiens
ctccaagcttggcct

SEQ ID NO: 185429 - DNA, 15 bp, Homo sapiens
tccaagcttggcctt

SEQ ID NO: 185430 - DNA, 15 bp, Homo sapiens
ccaagcttggccttt

SEQ ID NO: 185431 - DNA, 15 bp, Homo sapiens
caagcttggcctttc

SEQ ID NO: 185432 - DNA, 15 bp, Homo sapiens
aagcttggcctttcg

SEQ ID NO: 185433 - DNA, 15 bp, Homo sapiens
agcttggcctttcgg

SEQ ID NO: 185434 - DNA, 15 bp, Homo sapiens
gcttggcctttcggc

SEQ ID NO: 185435 - DNA, 15 bp, Homo sapiens
cttggcctttcggct

SEQ ID NO: 185436 - DNA, 15 bp, Homo sapiens
ttggcctttcggctc

SEQ ID NO: 185437 - DNA, 15 bp, Homo sapiens
tggcctttcggctca

SEQ ID NO: 185438 - DNA, 15 bp, Homo sapiens
ggcctttcggctcag

SEQ ID NO: 185439 - DNA, 15 bp, Homo sapiens
gcctttcggctcaga

SEQ ID NO: 185440 - DNA, 15 bp, Homo sapiens
cctttcggctcagat

SEQ ID NO: 185441 - DNA, 15 bp, Homo sapiens
ctttcggctcagatc

SEQ ID NO: 185442 - DNA, 15 bp, Homo sapiens
tttcggctcagatct

SEQ ID NO: 185443 - DNA, 15 bp, Homo sapiens
ttcggctcagatctc

SEQ ID NO: 185444 - DNA, 15 bp, Homo sapiens
tcggctcagatctca

SEQ ID NO: 185445 - DNA, 15 bp, Homo sapiens
cggctcagatctcag

SEQ ID NO: 185446 - DNA, 15 bp, Homo sapiens
ggctcagatctcagc

SEQ ID NO: 185447 - DNA, 15 bp, Homo sapiens
gctcagatctcagcc

SEQ ID NO: 185448 - DNA, 15 bp, Homo sapiens
ctcagatctcagccc

SEQ ID NO: 185449 - DNA, 15 bp, Homo sapiens
tcagatctcagccca

SEQ ID NO: 185450 - DNA, 15 bp, Homo sapiens
cagatctcagcccac

SEQ ID NO: 185451 - DNA, 15 bp, Homo sapiens
agatctcagcccaca

SEQ ID NO: 185452 - DNA, 15 bp, Homo sapiens
gatctcagcccacag

SEQ ID NO: 185453 - DNA, 15 bp, Homo sapiens
atctcagcccacagc

SEQ ID NO: 185454 - DNA, 15 bp, Homo sapiens
tctcagcccacagct

SEQ ID NO: 185455 - DNA, 15 bp, Homo sapiens
ctcagcccacagctg

SEQ ID NO: 185456 - DNA, 15 bp, Homo sapiens
tcagcccacagctgg

SEQ ID NO: 185457 - DNA, 15 bp, Homo sapiens
cagcccacagctggc

SEQ ID NO: 185458 - DNA, 15 bp, Homo sapiens
agcccacagctggcc

SEQ ID NO: 185459 - DNA, 15 bp, Homo sapiens
gcccacagctggcct

SEQ ID NO: 185460 - DNA, 15 bp, Homo sapiens
cccacagctggcctg

SEQ ID NO: 185461 - DNA, 15 bp, Homo sapiens
ccacagctggcctga

SEQ ID NO: 185462 - DNA, 15 bp, Homo sapiens
cacagctggcctgat

SEQ ID NO: 185463 - DNA, 15 bp, Homo sapiens
acagctggcctgatc

SEQ ID NO: 185464 - DNA, 15 bp, Homo sapiens
cagctggcctgatct

SEQ ID NO: 185465 - DNA, 15 bp, Homo sapiens
agctggcctgatctg

SEQ ID NO: 185466 - DNA, 15 bp, Homo sapiens
gctggcctgatctgg

SEQ ID NO: 185467 - DNA, 15 bp, Homo sapiens
ctggcctgatctggg

SEQ ID NO: 185468 - DNA, 15 bp, Homo sapiens
tggcctgatctgggt

SEQ ID NO: 185469 - DNA, 15 bp, Homo sapiens
ggcctgatctgggtc

SEQ ID NO: 185470 - DNA, 15 bp, Homo sapiens
gcctgatctgggtct

SEQ ID NO: 185471 - DNA, 15 bp, Homo sapiens
cctgatctgggtctc

SEQ ID NO: 185472 - DNA, 15 bp, Homo sapiens
ctgatctgggtctcc

SEQ ID NO: 185473 - DNA, 15 bp, Homo sapiens
tgatctgggtctccc

SEQ ID NO: 185474 - DNA, 15 bp, Homo sapiens
gatctgggtctcccc

SEQ ID NO: 185475 - DNA, 15 bp, Homo sapiens
atctgggtctcccct

SEQ ID NO: 185476 - DNA, 15 bp, Homo sapiens
tctgggtctcccctc

SEQ ID NO: 185477 - DNA, 15 bp, Homo sapiens
ctgggtctcccctcc

SEQ ID NO: 185478 - DNA, 15 bp, Homo sapiens
tgggtctcccctccc

SEQ ID NO: 185479 - DNA, 15 bp, Homo sapiens
gggtctcccctccca

SEQ ID NO: 185480 - DNA, 15 bp, Homo sapiens
ggtctcccctcccac

SEQ ID NO: 185481 - DNA, 15 bp, Homo sapiens
gtctcccctcccacc

SEQ ID NO: 185482 - DNA, 15 bp, Homo sapiens
tctcccctcccaccc

SEQ ID NO: 185483 - DNA, 15 bp, Homo sapiens
ctcccctcccaccct

SEQ ID NO: 185484 - DNA, 15 bp, Homo sapiens
tcccctcccaccctc

SEQ ID NO: 185485 - DNA, 15 bp, Homo sapiens
cccctcccaccctca

SEQ ID NO: 185486 - DNA, 15 bp, Homo sapiens
ccctcccaccctcag

SEQ ID NO: 185487 - DNA, 15 bp, Homo sapiens
cctcccaccctcagg

SEQ ID NO: 185488 - DNA, 15 bp, Homo sapiens
ctcccaccctcaggg

SEQ ID NO: 185489 - DNA, 15 bp, Homo sapiens
tcccaccctcaggga

SEQ ID NO: 185490 - DNA, 15 bp, Homo sapiens
cccaccctcagggag

SEQ ID NO: 185491 - DNA, 15 bp, Homo sapiens
ccaccctcagggagc

SEQ ID NO: 185492 - DNA, 15 bp, Homo sapiens
caccctcagggagcc

SEQ ID NO: 185493 - DNA, 15 bp, Homo sapiens
accctcagggagcca

SEQ ID NO: 185494 - DNA, 15 bp, Homo sapiens
ccctcagggagccag

SEQ ID NO: 185495 - DNA, 15 bp, Homo sapiens
cctcagggagccagg

SEQ ID NO: 185496 - DNA, 15 bp, Homo sapiens
ctcagggagccaggc

SEQ ID NO: 185497 - DNA, 15 bp, Homo sapiens
tcagggagccaggct

SEQ ID NO: 185498 - DNA, 15 bp, Homo sapiens
cagggagccaggctc

SEQ ID NO: 185499 - DNA, 15 bp, Homo sapiens
agggagccaggctcg

SEQ ID NO: 185500 - DNA, 15 bp, Homo sapiens
gggagccaggctcgg

SEQ ID NO: 185501 - DNA, 15 bp, Homo sapiens
ggagccaggctcggc

SEQ ID NO: 185502 - DNA, 15 bp, Homo sapiens
gagccaggctcggca

SEQ ID NO: 185503 - DNA, 15 bp, Homo sapiens
agccaggctcggcat

SEQ ID NO: 185504 - DNA, 15 bp, Homo sapiens
gccaggctcggcatt

SEQ ID NO: 185505 - DNA, 15 bp, Homo sapiens
ccaggctcggcattt

SEQ ID NO: 185506 - DNA, 15 bp, Homo sapiens
caggctcggcatttc

SEQ ID NO: 185507 - DNA, 15 bp, Homo sapiens
aggctcggcatttct

SEQ ID NO: 185508 - DNA, 15 bp, Homo sapiens
ggctcggcatttctg

SEQ ID NO: 185509 - DNA, 15 bp, Homo sapiens
gctcggcatttctgg

SEQ ID NO: 185510 - DNA, 15 bp, Homo sapiens
ctcggcatttctggc

SEQ ID NO: 185511 - DNA, 15 bp, Homo sapiens
tcggcatttctggca

SEQ ID NO: 185512 - DNA, 15 bp, Homo sapiens
cggcatttctggcag

SEQ ID NO: 185513 - DNA, 15 bp, Homo sapiens
ggcatttctggcagc

SEQ ID NO: 185514 - DNA, 15 bp, Homo sapiens
gcatttctggcagca

SEQ ID NO: 185515 - DNA, 15 bp, Homo sapiens
catttctggcagcaa

SEQ ID NO: 185516 - DNA, 15 bp, Homo sapiens
atttctggcagcaag

SEQ ID NO: 185517 - DNA, 15 bp, Homo sapiens
tttctggcagcaaga

SEQ ID NO: 185518 - DNA, 15 bp, Homo sapiens
ttctggcagcaagat

SEQ ID NO: 185519 - DNA, 15 bp, Homo sapiens
tctggcagcaagatg

SEQ ID NO: 185520 - DNA, 15 bp, Homo sapiens
ctggcagcaagatga

SEQ ID NO: 185521 - DNA, 15 bp, Homo sapiens
tggcagcaagatgaa

SEQ ID NO: 185522 - DNA, 15 bp, Homo sapiens
ggcagcaagatgaac

SEQ ID NO: 185523 - DNA, 15 bp, Homo sapiens
gcagcaagatgaacc

SEQ ID NO: 185524 - DNA, 15 bp, Homo sapiens
cagcaagatgaaccc

SEQ ID NO: 185525 - DNA, 15 bp, Homo sapiens
agcaagatgaacccc

SEQ ID NO: 185526 - DNA, 15 bp, Homo sapiens
gcaagatgaaccccc

SEQ ID NO: 185527 - DNA, 15 bp, Homo sapiens
caagatgaacccccc

SEQ ID NO: 185528 - DNA, 15 bp, Homo sapiens
aagatgaaccccccc

SEQ ID NO: 185529 - DNA, 15 bp, Homo sapiens
agatgaaccccccca

SEQ ID NO: 185530 - DNA, 15 bp, Homo sapiens
gatgaacccccccag

SEQ ID NO: 185531 - DNA, 15 bp, Homo sapiens
atgaacccccccaga

SEQ ID NO: 185532 - DNA, 15 bp, Homo sapiens
tgaacccccccagag

SEQ ID NO: 185533 - DNA, 15 bp, Homo sapiens
gaacccccccagagc

SEQ ID NO: 185534 - DNA, 15 bp, Homo sapiens
aacccccccagagcc

SEQ ID NO: 185535 - DNA, 15 bp, Homo sapiens
acccccccagagccc

SEQ ID NO: 185536 - DNA, 15 bp, Homo sapiens
cccccccagagcccc

SEQ ID NO: 185537 - DNA, 15 bp, Homo sapiens
ccccccagagcccct

SEQ ID NO: 185538 - DNA, 15 bp, Homo sapiens
cccccagagcccctg

SEQ ID NO: 185539 - DNA, 15 bp, Homo sapiens
ccccagagcccctgg

SEQ ID NO: 185540 - DNA, 15 bp, Homo sapiens
cccagagcccctggg

SEQ ID NO: 185541 - DNA, 15 bp, Homo sapiens
ccagagcccctggga

SEQ ID NO: 185542 - DNA, 15 bp, Homo sapiens
cagagcccctgggat

SEQ ID NO: 185543 - DNA, 15 bp, Homo sapiens
agagcccctgggatc

SEQ ID NO: 185544 - DNA, 15 bp, Homo sapiens
gagcccctgggatcg

SEQ ID NO: 185545 - DNA, 15 bp, Homo sapiens
agcccctgggatcga

SEQ ID NO: 185546 - DNA, 15 bp, Homo sapiens
gcccctgggatcgag

SEQ ID NO: 185547 - DNA, 15 bp, Homo sapiens
cccctgggatcgagt

SEQ ID NO: 185548 - DNA, 15 bp, Homo sapiens
ccctgggatcgagtg

SEQ ID NO: 185549 - DNA, 15 bp, Homo sapiens
cctgggatcgagtga

SEQ ID NO: 185550 - DNA, 15 bp, Homo sapiens
ctgggatcgagtgaa

SEQ ID NO: 185551 - DNA, 15 bp, Homo sapiens
tgggatcgagtgaag

SEQ ID NO: 185552 - DNA, 15 bp, Homo sapiens
gggatcgagtgaagg

SEQ ID NO: 185553 - DNA, 15 bp, Homo sapiens
ggatcgagtgaagga

SEQ ID NO: 185554 - DNA, 15 bp, Homo sapiens
gatcgagtgaaggac

SEQ ID NO: 185555 - DNA, 15 bp, Homo sapiens
atcgagtgaaggacc

SEQ ID NO: 185556 - DNA, 15 bp, Homo sapiens
tcgagtgaaggacct

SEQ ID NO: 185557 - DNA, 15 bp, Homo sapiens
cgagtgaaggacctg

SEQ ID NO: 185558 - DNA, 15 bp, Homo sapiens
gagtgaaggacctgg

SEQ ID NO: 185559 - DNA, 15 bp, Homo sapiens
agtgaaggacctggc

SEQ ID NO: 185560 - DNA, 15 bp, Homo sapiens
gtgaaggacctggcc

SEQ ID NO: 185561 - DNA, 15 bp, Homo sapiens
tgaaggacctggcca

SEQ ID NO: 185562 - DNA, 15 bp, Homo sapiens
gaaggacctggccac

SEQ ID NO: 185563 - DNA, 15 bp, Homo sapiens
aaggacctggccact

SEQ ID NO: 185564 - DNA, 15 bp, Homo sapiens
aggacctggccactg

SEQ ID NO: 185565 - DNA, 15 bp, Homo sapiens
ggacctggccactgt

SEQ ID NO: 185566 - DNA, 15 bp, Homo sapiens
gacctggccactgtg

SEQ ID NO: 185567 - DNA, 15 bp, Homo sapiens
acctggccactgtgt

SEQ ID NO: 185568 - DNA, 15 bp, Homo sapiens
cctggccactgtgta

SEQ ID NO: 185569 - DNA, 15 bp, Homo sapiens
ctggccactgtgtac

SEQ ID NO: 185570 - DNA, 15 bp, Homo sapiens
tggccactgtgtacg

SEQ ID NO: 185571 - DNA, 15 bp, Homo sapiens
ggccactgtgtacgt

SEQ ID NO: 185572 - DNA, 15 bp, Homo sapiens
gccactgtgtacgtg

SEQ ID NO: 185573 - DNA, 15 bp, Homo sapiens
ccactgtgtacgtgg

SEQ ID NO: 185574 - DNA, 15 bp, Homo sapiens
cactgtgtacgtgga

SEQ ID NO: 185575 - DNA, 15 bp, Homo sapiens
actgtgtacgtggat

SEQ ID NO: 185576 - DNA, 15 bp, Homo sapiens
ctgtgtacgtggatg

SEQ ID NO: 185577 - DNA, 15 bp, Homo sapiens
tgtgtacgtggatgt

SEQ ID NO: 185578 - DNA, 15 bp, Homo sapiens
gtgtacgtggatgtg

SEQ ID NO: 185579 - DNA, 15 bp, Homo sapiens
tgtacgtggatgtgc

SEQ ID NO: 185580 - DNA, 15 bp, Homo sapiens
gtacgtggatgtgct

SEQ ID NO: 185581 - DNA, 15 bp, Homo sapiens
tacgtggatgtgctc

SEQ ID NO: 185582 - DNA, 15 bp, Homo sapiens
acgtggatgtgctca

SEQ ID NO: 185583 - DNA, 15 bp, Homo sapiens
cgtggatgtgctcaa

SEQ ID NO: 185584 - DNA, 15 bp, Homo sapiens
gtggatgtgctcaaa

SEQ ID NO: 185585 - DNA, 15 bp, Homo sapiens
tggatgtgctcaaag

SEQ ID NO: 185586 - DNA, 15 bp, Homo sapiens
ggatgtgctcaaaga

SEQ ID NO: 185587 - DNA, 15 bp, Homo sapiens
gatgtgctcaaagac

SEQ ID NO: 185588 - DNA, 15 bp, Homo sapiens
atgtgctcaaagaca

SEQ ID NO: 185589 - DNA, 15 bp, Homo sapiens
tgtgctcaaagacag

SEQ ID NO: 185590 - DNA, 15 bp, Homo sapiens
gtgctcaaagacagc

SEQ ID NO: 185591 - DNA, 15 bp, Homo sapiens
tgctcaaagacagcg

SEQ ID NO: 185592 - DNA, 15 bp, Homo sapiens
gctcaaagacagcgg

SEQ ID NO: 185593 - DNA, 15 bp, Homo sapiens
ctcaaagacagcggc

SEQ ID NO: 185594 - DNA, 15 bp, Homo sapiens
tcaaagacagcggca

SEQ ID NO: 185595 - DNA, 15 bp, Homo sapiens
caaagacagcggcag

SEQ ID NO: 185596 - DNA, 15 bp, Homo sapiens
aaagacagcggcaga

SEQ ID NO: 185597 - DNA, 15 bp, Homo sapiens
aagacagcggcagag

SEQ ID NO: 185598 - DNA, 15 bp, Homo sapiens
agacagcggcagaga

SEQ ID NO: 185599 - DNA, 15 bp, Homo sapiens
gacagcggcagagac

SEQ ID NO: 185600 - DNA, 15 bp, Homo sapiens
acagcggcagagact

SEQ ID NO: 185601 - DNA, 15 bp, Homo sapiens
cagcggcagagacta

SEQ ID NO: 185602 - DNA, 15 bp, Homo sapiens
agcggcagagactat

SEQ ID NO: 185603 - DNA, 15 bp, Homo sapiens
gcggcagagactatg

SEQ ID NO: 185604 - DNA, 15 bp, Homo sapiens
cggcagagactatgt

SEQ ID NO: 185605 - DNA, 15 bp, Homo sapiens
ggcagagactatgtg

SEQ ID NO: 185606 - DNA, 15 bp, Homo sapiens
gcagagactatgtgt

SEQ ID NO: 185607 - DNA, 15 bp, Homo sapiens
cagagactatgtgtc

SEQ ID NO: 185608 - DNA, 15 bp, Homo sapiens
agagactatgtgtcc

SEQ ID NO: 185609 - DNA, 15 bp, Homo sapiens
gagactatgtgtccc

SEQ ID NO: 185610 - DNA, 15 bp, Homo sapiens
agactatgtgtccca

SEQ ID NO: 185611 - DNA, 15 bp, Homo sapiens
gactatgtgtcccag

SEQ ID NO: 185612 - DNA, 15 bp, Homo sapiens
actatgtgtcccagt

SEQ ID NO: 185613 - DNA, 15 bp, Homo sapiens
ctatgtgtcccagtt

SEQ ID NO: 185614 - DNA, 15 bp, Homo sapiens
tatgtgtcccagttt

SEQ ID NO: 185615 - DNA, 15 bp, Homo sapiens
atgtgtcccagtttg

SEQ ID NO: 185616 - DNA, 15 bp, Homo sapiens
tgtgtcccagtttga

SEQ ID NO: 185617 - DNA, 15 bp, Homo sapiens
gtgtcccagtttgaa

SEQ ID NO: 185618 - DNA, 15 bp, Homo sapiens
tgtcccagtttgaag

SEQ ID NO: 185619 - DNA, 15 bp, Homo sapiens
gtcccagtttgaagg

SEQ ID NO: 185620 - DNA, 15 bp, Homo sapiens
tcccagtttgaaggc

SEQ ID NO: 185621 - DNA, 15 bp, Homo sapiens
cccagtttgaaggct

SEQ ID NO: 185622 - DNA, 15 bp, Homo sapiens
ccagtttgaaggctc

SEQ ID NO: 185623 - DNA, 15 bp, Homo sapiens
cagtttgaaggctcc

SEQ ID NO: 185624 - DNA, 15 bp, Homo sapiens
agtttgaaggctccg

SEQ ID NO: 185625 - DNA, 15 bp, Homo sapiens
gtttgaaggctccgc

SEQ ID NO: 185626 - DNA, 15 bp, Homo sapiens
tttgaaggctccgcc

SEQ ID NO: 185627 - DNA, 15 bp, Homo sapiens
ttgaaggctccgcct

SEQ ID NO: 185628 - DNA, 15 bp, Homo sapiens
tgaaggctccgcctt

SEQ ID NO: 185629 - DNA, 15 bp, Homo sapiens
gaaggctccgccttg

SEQ ID NO: 185630 - DNA, 15 bp, Homo sapiens
aaggctccgccttgg

SEQ ID NO: 185631 - DNA, 15 bp, Homo sapiens
aggctccgccttggg

SEQ ID NO: 185632 - DNA, 15 bp, Homo sapiens
ggctccgccttggga

SEQ ID NO: 185633 - DNA, 15 bp, Homo sapiens
gctccgccttgggaa

SEQ ID NO: 185634 - DNA, 15 bp, Homo sapiens
ctccgccttgggaaa

SEQ ID NO: 185635 - DNA, 15 bp, Homo sapiens
tccgccttgggaaaa

SEQ ID NO: 185636 - DNA, 15 bp, Homo sapiens
ccgccttgggaaaac

SEQ ID NO: 185637 - DNA, 15 bp, Homo sapiens
cgccttgggaaaaca

SEQ ID NO: 185638 - DNA, 15 bp, Homo sapiens
gccttgggaaaacag

SEQ ID NO: 185639 - DNA, 15 bp, Homo sapiens
ccttgggaaaacagc

SEQ ID NO: 185640 - DNA, 15 bp, Homo sapiens
cttgggaaaacagct

SEQ ID NO: 185641 - DNA, 15 bp, Homo sapiens
ttgggaaaacagcta

SEQ ID NO: 185642 - DNA, 15 bp, Homo sapiens
tgggaaaacagctaa

SEQ ID NO: 185643 - DNA, 15 bp, Homo sapiens
gggaaaacagctaaa

SEQ ID NO: 185644 - DNA, 15 bp, Homo sapiens
ggaaaacagctaaag

SEQ ID NO: 185645 - DNA, 15 bp, Homo sapiens
gaaaacagctaaagt

SEQ ID NO: 185646 - DNA, 15 bp, Homo sapiens
aaaacagctaaagta

SEQ ID NO: 185647 - DNA, 15 bp, Homo sapiens
aaacagctaaagtaa

SEQ ID NO: 185648 - DNA, 15 bp, Homo sapiens
aacagctaaagtaag

SEQ ID NO: 185649 - DNA, 15 bp, Homo sapiens
acagctaaagtaagg

SEQ ID NO: 185650 - DNA, 15 bp, Homo sapiens
cagctaaagtaagga

SEQ ID NO: 185651 - DNA, 15 bp, Homo sapiens
agctaaagtaaggac

SEQ ID NO: 185652 - DNA, 15 bp, Homo sapiens
gctaaagtaaggacc

SEQ ID NO: 185653 - DNA, 15 bp, Homo sapiens
ctaaagtaaggaccc

SEQ ID NO: 185654 - DNA, 15 bp, Homo sapiens
taaagtaaggaccca

SEQ ID NO: 185655 - DNA, 15 bp, Homo sapiens
aaagtaaggacccag

SEQ ID NO: 185656 - DNA, 15 bp, Homo sapiens
aagtaaggacccagc

SEQ ID NO: 185657 - DNA, 15 bp, Homo sapiens
agtaaggacccagcc

SEQ ID NO: 185658 - DNA, 15 bp, Homo sapiens
gtaaggacccagcct

SEQ ID NO: 185659 - DNA, 15 bp, Homo sapiens
taaggacccagcctg

SEQ ID NO: 185660 - DNA, 15 bp, Homo sapiens
aaggacccagcctgg

SEQ ID NO: 185661 - DNA, 15 bp, Homo sapiens
aggacccagcctggg

SEQ ID NO: 185662 - DNA, 15 bp, Homo sapiens
ggacccagcctgggg

SEQ ID NO: 185663 - DNA, 15 bp, Homo sapiens
gacccagcctggggt

SEQ ID NO: 185664 - DNA, 15 bp, Homo sapiens
acccagcctggggtt

SEQ ID NO: 185665 - DNA, 15 bp, Homo sapiens
cccagcctggggttg

SEQ ID NO: 185666 - DNA, 15 bp, Homo sapiens
ccagcctggggttga

SEQ ID NO: 185667 - DNA, 15 bp, Homo sapiens
cagcctggggttgag

SEQ ID NO: 185668 - DNA, 15 bp, Homo sapiens
agcctggggttgagg

SEQ ID NO: 185669 - DNA, 15 bp, Homo sapiens
gcctggggttgaggg

SEQ ID NO: 185670 - DNA, 15 bp, Homo sapiens
cctggggttgagggc

SEQ ID NO: 185671 - DNA, 15 bp, Homo sapiens
ctggggttgagggca

SEQ ID NO: 185672 - DNA, 15 bp, Homo sapiens
tggggttgagggcag

SEQ ID NO: 185673 - DNA, 15 bp, Homo sapiens
ggggttgagggcagg

SEQ ID NO: 185674 - DNA, 15 bp, Homo sapiens
gggttgagggcaggg

SEQ ID NO: 185675 - DNA, 15 bp, Homo sapiens
ggttgagggcagggg

SEQ ID NO: 185676 - DNA, 15 bp, Homo sapiens
gttgagggcaggggt

SEQ ID NO: 185677 - DNA, 15 bp, Homo sapiens
ttgagggcaggggta

SEQ ID NO: 185678 - DNA, 15 bp, Homo sapiens
tgagggcaggggtag

SEQ ID NO: 185679 - DNA, 15 bp, Homo sapiens
gagggcaggggtagg

SEQ ID NO: 185680 - DNA, 15 bp, Homo sapiens
agggcaggggtaggg

SEQ ID NO: 185681 - DNA, 15 bp, Homo sapiens
gggcaggggtagggg

SEQ ID NO: 185682 - DNA, 15 bp, Homo sapiens
ggcaggggtaggggg

SEQ ID NO: 185683 - DNA, 15 bp, Homo sapiens
gcaggggtagggggc

SEQ ID NO: 185684 - DNA, 15 bp, Homo sapiens
caggggtagggggca

SEQ ID NO: 185685 - DNA, 15 bp, Homo sapiens
aggggtagggggcag

SEQ ID NO: 185686 - DNA, 15 bp, Homo sapiens
ggggtagggggcaga

SEQ ID NO: 185687 - DNA, 15 bp, Homo sapiens
gggtagggggcagag

SEQ ID NO: 185688 - DNA, 15 bp, Homo sapiens
ggtagggggcagagg

SEQ ID NO: 185689 - DNA, 15 bp, Homo sapiens
gtagggggcagaggc

SEQ ID NO: 185690 - DNA, 15 bp, Homo sapiens
tagggggcagaggcc

SEQ ID NO: 185691 - DNA, 15 bp, Homo sapiens
agggggcagaggcct

SEQ ID NO: 185692 - DNA, 15 bp, Homo sapiens
gggggcagaggcctg

SEQ ID NO: 185693 - DNA, 15 bp, Homo sapiens
ggggcagaggcctgt

SEQ ID NO: 185694 - DNA, 15 bp, Homo sapiens
gggcagaggcctgtg

SEQ ID NO: 185695 - DNA, 15 bp, Homo sapiens
ggcagaggcctgtgg

SEQ ID NO: 185696 - DNA, 15 bp, Homo sapiens
gcagaggcctgtggg

SEQ ID NO: 185697 - DNA, 15 bp, Homo sapiens
cagaggcctgtggga

SEQ ID NO: 185698 - DNA, 15 bp, Homo sapiens
agaggcctgtgggat

SEQ ID NO: 185699 - DNA, 15 bp, Homo sapiens
gaggcctgtgggatg

SEQ ID NO: 185700 - DNA, 15 bp, Homo sapiens
aggcctgtgggatga

SEQ ID NO: 185701 - DNA, 15 bp, Homo sapiens
ggcctgtgggatgat

SEQ ID NO: 185702 - DNA, 15 bp, Homo sapiens
gcctgtgggatgatg

SEQ ID NO: 185703 - DNA, 15 bp, Homo sapiens
cctgtgggatgatgt

SEQ ID NO: 185704 - DNA, 15 bp, Homo sapiens
ctgtgggatgatgtt

SEQ ID NO: 185705 - DNA, 15 bp, Homo sapiens
tgtgggatgatgttg

SEQ ID NO: 185706 - DNA, 15 bp, Homo sapiens
gtgggatgatgttga

SEQ ID NO: 185707 - DNA, 15 bp, Homo sapiens
tgggatgatgttgaa

SEQ ID NO: 185708 - DNA, 15 bp, Homo sapiens
gggatgatgttgaag

SEQ ID NO: 185709 - DNA, 15 bp, Homo sapiens
ggatgatgttgaagc

SEQ ID NO: 185710 - DNA, 15 bp, Homo sapiens
gatgatgttgaagcc

SEQ ID NO: 185711 - DNA, 15 bp, Homo sapiens
atgatgttgaagcca

SEQ ID NO: 185712 - DNA, 15 bp, Homo sapiens
tgatgttgaagccag

SEQ ID NO: 185713 - DNA, 15 bp, Homo sapiens
gatgttgaagccaga

SEQ ID NO: 185714 - DNA, 15 bp, Homo sapiens
atgttgaagccagac

SEQ ID NO: 185715 - DNA, 15 bp, Homo sapiens
tgttgaagccagact

SEQ ID NO: 185716 - DNA, 15 bp, Homo sapiens
gttgaagccagactg

SEQ ID NO: 185717 - DNA, 15 bp, Homo sapiens
ttgaagccagactgg

SEQ ID NO: 185718 - DNA, 15 bp, Homo sapiens
tgaagccagactggc

SEQ ID NO: 185719 - DNA, 15 bp, Homo sapiens
gaagccagactggcc

SEQ ID NO: 185720 - DNA, 15 bp, Homo sapiens
aagccagactggccg

SEQ ID NO: 185721 - DNA, 15 bp, Homo sapiens
agccagactggccga

SEQ ID NO: 185722 - DNA, 15 bp, Homo sapiens
gccagactggccgag

SEQ ID NO: 185723 - DNA, 15 bp, Homo sapiens
ccagactggccgagt

SEQ ID NO: 185724 - DNA, 15 bp, Homo sapiens
cagactggccgagtc

SEQ ID NO: 185725 - DNA, 15 bp, Homo sapiens
agactggccgagtcc

SEQ ID NO: 185726 - DNA, 15 bp, Homo sapiens
gactggccgagtcct

SEQ ID NO: 185727 - DNA, 15 bp, Homo sapiens
actggccgagtcctc

SEQ ID NO: 185728 - DNA, 15 bp, Homo sapiens
ctggccgagtcctca

SEQ ID NO: 185729 - DNA, 15 bp, Homo sapiens
tggccgagtcctcac

SEQ ID NO: 185730 - DNA, 15 bp, Homo sapiens
ggccgagtcctcacc

SEQ ID NO: 185731 - DNA, 15 bp, Homo sapiens
gccgagtcctcacct

SEQ ID NO: 185732 - DNA, 15 bp, Homo sapiens
ccgagtcctcaccta

SEQ ID NO: 185733 - DNA, 15 bp, Homo sapiens
cgagtcctcacctaa

SEQ ID NO: 185734 - DNA, 15 bp, Homo sapiens
gagtcctcacctaat

SEQ ID NO: 185735 - DNA, 15 bp, Homo sapiens
agtcctcacctaata

SEQ ID NO: 185736 - DNA, 15 bp, Homo sapiens
gtcctcacctaatat

SEQ ID NO: 185737 - DNA, 15 bp, Homo sapiens
tcctcacctaatatc

SEQ ID NO: 185738 - DNA, 15 bp, Homo sapiens
cctcacctaatatct

SEQ ID NO: 185739 - DNA, 15 bp, Homo sapiens
ctcacctaatatctg

SEQ ID NO: 185740 - DNA, 15 bp, Homo sapiens
tcacctaatatctga

SEQ ID NO: 185741 - DNA, 15 bp, Homo sapiens
cacctaatatctgat

SEQ ID NO: 185742 - DNA, 15 bp, Homo sapiens
acctaatatctgatg

SEQ ID NO: 185743 - DNA, 15 bp, Homo sapiens
cctaatatctgatga

SEQ ID NO: 185744 - DNA, 15 bp, Homo sapiens
ctaatatctgatgag

SEQ ID NO: 185745 - DNA, 15 bp, Homo sapiens
taatatctgatgagc

SEQ ID NO: 185746 - DNA, 15 bp, Homo sapiens
aatatctgatgagct

SEQ ID NO: 185747 - DNA, 15 bp, Homo sapiens
atatctgatgagctg

SEQ ID NO: 185748 - DNA, 15 bp, Homo sapiens
tatctgatgagctgg

SEQ ID NO: 185749 - DNA, 15 bp, Homo sapiens
atctgatgagctggg

SEQ ID NO: 185750 - DNA, 15 bp, Homo sapiens
tctgatgagctgggc

SEQ ID NO: 185751 - DNA, 15 bp, Homo sapiens
ctgatgagctgggcc

SEQ ID NO: 185752 - DNA, 15 bp, Homo sapiens
tgatgagctgggccc

SEQ ID NO: 185753 - DNA, 15 bp, Homo sapiens
gatgagctgggcccc

SEQ ID NO: 185754 - DNA, 15 bp, Homo sapiens
atgagctgggcccca

SEQ ID NO: 185755 - DNA, 15 bp, Homo sapiens
tgagctgggccccac

SEQ ID NO: 185756 - DNA, 15 bp, Homo sapiens
gagctgggccccaca

SEQ ID NO: 185757 - DNA, 15 bp, Homo sapiens
agctgggccccacag

SEQ ID NO: 185758 - DNA, 15 bp, Homo sapiens
gctgggccccacaga

SEQ ID NO: 185759 - DNA, 15 bp, Homo sapiens
ctgggccccacagat

SEQ ID NO: 185760 - DNA, 15 bp, Homo sapiens
tgggccccacagatg

SEQ ID NO: 185761 - DNA, 15 bp, Homo sapiens
gggccccacagatgg

SEQ ID NO: 185762 - DNA, 15 bp, Homo sapiens
ggccccacagatggt

SEQ ID NO: 185763 - DNA, 15 bp, Homo sapiens
gccccacagatggtc

SEQ ID NO: 185764 - DNA, 15 bp, Homo sapiens
ccccacagatggtct

SEQ ID NO: 185765 - DNA, 15 bp, Homo sapiens
cccacagatggtctg

SEQ ID NO: 185766 - DNA, 15 bp, Homo sapiens
ccacagatggtctgg

SEQ ID NO: 185767 - DNA, 15 bp, Homo sapiens
cacagatggtctgga

SEQ ID NO: 185768 - DNA, 15 bp, Homo sapiens
acagatggtctggat

SEQ ID NO: 185769 - DNA, 15 bp, Homo sapiens
cagatggtctggatg

SEQ ID NO: 185770 - DNA, 15 bp, Homo sapiens
agatggtctggatgg

SEQ ID NO: 185771 - DNA, 15 bp, Homo sapiens
gatggtctggatgga

SEQ ID NO: 185772 - DNA, 15 bp, Homo sapiens
atggtctggatggag

SEQ ID NO: 185773 - DNA, 15 bp, Homo sapiens
tggtctggatggaga

SEQ ID NO: 185774 - DNA, 15 bp, Homo sapiens
ggtctggatggagaa

SEQ ID NO: 185775 - DNA, 15 bp, Homo sapiens
gtctggatggagaaa

SEQ ID NO: 185776 - DNA, 15 bp, Homo sapiens
tctggatggagaaac

SEQ ID NO: 185777 - DNA, 15 bp, Homo sapiens
ctggatggagaaact

SEQ ID NO: 185778 - DNA, 15 bp, Homo sapiens
tggatggagaaactg

SEQ ID NO: 185779 - DNA, 15 bp, Homo sapiens
ggatggagaaactgg

SEQ ID NO: 185780 - DNA, 15 bp, Homo sapiens
gatggagaaactgga

SEQ ID NO: 185781 - DNA, 15 bp, Homo sapiens
atggagaaactggaa

SEQ ID NO: 185782 - DNA, 15 bp, Homo sapiens
tggagaaactggaat

SEQ ID NO: 185783 - DNA, 15 bp, Homo sapiens
ggagaaactggaatg

SEQ ID NO: 185784 - DNA, 15 bp, Homo sapiens
gagaaactggaatgg

SEQ ID NO: 185785 - DNA, 15 bp, Homo sapiens
agaaactggaatggg

SEQ ID NO: 185786 - DNA, 15 bp, Homo sapiens
gaaactggaatggga

SEQ ID NO: 185787 - DNA, 15 bp, Homo sapiens
aaactggaatgggat

SEQ ID NO: 185788 - DNA, 15 bp, Homo sapiens
aactggaatgggatc

SEQ ID NO: 185789 - DNA, 15 bp, Homo sapiens
actggaatgggatct

SEQ ID NO: 185790 - DNA, 15 bp, Homo sapiens
ctggaatgggatctc

SEQ ID NO: 185791 - DNA, 15 bp, Homo sapiens
tggaatgggatctcc

SEQ ID NO: 185792 - DNA, 15 bp, Homo sapiens
ggaatgggatctcca

SEQ ID NO: 185793 - DNA, 15 bp, Homo sapiens
gaatgggatctccag

SEQ ID NO: 185794 - DNA, 15 bp, Homo sapiens
aatgggatctccagg

SEQ ID NO: 185795 - DNA, 15 bp, Homo sapiens
atgggatctccaggc

SEQ ID NO: 185796 - DNA, 15 bp, Homo sapiens
tgggatctccaggca

SEQ ID NO: 185797 - DNA, 15 bp, Homo sapiens
gggatctccaggcag

SEQ ID NO: 185798 - DNA, 15 bp, Homo sapiens
ggatctccaggcagg

SEQ ID NO: 185799 - DNA, 15 bp, Homo sapiens
gatctccaggcaggg

SEQ ID NO: 185800 - DNA, 15 bp, Homo sapiens
atctccaggcagggt

SEQ ID NO: 185801 - DNA, 15 bp, Homo sapiens
tctccaggcagggtc

SEQ ID NO: 185802 - DNA, 15 bp, Homo sapiens
ctccaggcagggtca

SEQ ID NO: 185803 - DNA, 15 bp, Homo sapiens
tccaggcagggtcac

SEQ ID NO: 185804 - DNA, 15 bp, Homo sapiens
ccaggcagggtcaca

SEQ ID NO: 185805 - DNA, 15 bp, Homo sapiens
caggcagggtcacag

SEQ ID NO: 185806 - DNA, 15 bp, Homo sapiens
aggcagggtcacagc

SEQ ID NO: 185807 - DNA, 15 bp, Homo sapiens
ggcagggtcacagcc

SEQ ID NO: 185808 - DNA, 15 bp, Homo sapiens
gcagggtcacagccc

SEQ ID NO: 185809 - DNA, 15 bp, Homo sapiens
cagggtcacagccca

SEQ ID NO: 185810 - DNA, 15 bp, Homo sapiens
agggtcacagcccat

SEQ ID NO: 185811 - DNA, 15 bp, Homo sapiens
gggtcacagcccatg

SEQ ID NO: 185812 - DNA, 15 bp, Homo sapiens
ggtcacagcccatgt

SEQ ID NO: 185813 - DNA, 15 bp, Homo sapiens
gtcacagcccatgtc

SEQ ID NO: 185814 - DNA, 15 bp, Homo sapiens
tcacagcccatgtcc

SEQ ID NO: 185815 - DNA, 15 bp, Homo sapiens
cacagcccatgtccc

SEQ ID NO: 185816 - DNA, 15 bp, Homo sapiens
acagcccatgtcccc

SEQ ID NO: 185817 - DNA, 15 bp, Homo sapiens
cagcccatgtcccct

SEQ ID NO: 185818 - DNA, 15 bp, Homo sapiens
agcccatgtcccctg

SEQ ID NO: 185819 - DNA, 15 bp, Homo sapiens
gcccatgtcccctgc

SEQ ID NO: 185820 - DNA, 15 bp, Homo sapiens
cccatgtcccctgca

SEQ ID NO: 185821 - DNA, 15 bp, Homo sapiens
ccatgtcccctgcaa

SEQ ID NO: 185822 - DNA, 15 bp, Homo sapiens
catgtcccctgcaaa

SEQ ID NO: 185823 - DNA, 15 bp, Homo sapiens
atgtcccctgcaaag

SEQ ID NO: 185824 - DNA, 15 bp, Homo sapiens
tgtcccctgcaaagg

SEQ ID NO: 185825 - DNA, 15 bp, Homo sapiens
gtcccctgcaaagga

SEQ ID NO: 185826 - DNA, 15 bp, Homo sapiens
tcccctgcaaaggac

SEQ ID NO: 185827 - DNA, 15 bp, Homo sapiens
cccctgcaaaggaca

SEQ ID NO: 185828 - DNA, 15 bp, Homo sapiens
ccctgcaaaggacag

SEQ ID NO: 185829 - DNA, 15 bp, Homo sapiens
cctgcaaaggacaga

SEQ ID NO: 185830 - DNA, 15 bp, Homo sapiens
ctgcaaaggacagac

SEQ ID NO: 185831 - DNA, 15 bp, Homo sapiens
tgcaaaggacagacc

SEQ ID NO: 185832 - DNA, 15 bp, Homo sapiens
gcaaaggacagacca

SEQ ID NO: 185833 - DNA, 15 bp, Homo sapiens
caaaggacagaccag

SEQ ID NO: 185834 - DNA, 15 bp, Homo sapiens
aaaggacagaccagg

SEQ ID NO: 185835 - DNA, 15 bp, Homo sapiens
aaggacagaccaggg

SEQ ID NO: 185836 - DNA, 15 bp, Homo sapiens
aggacagaccagggc

SEQ ID NO: 185837 - DNA, 15 bp, Homo sapiens
ggacagaccagggct

SEQ ID NO: 185838 - DNA, 15 bp, Homo sapiens
gacagaccagggctg

SEQ ID NO: 185839 - DNA, 15 bp, Homo sapiens
acagaccagggctgc

SEQ ID NO: 185840 - DNA, 15 bp, Homo sapiens
cagaccagggctgcc

SEQ ID NO: 185841 - DNA, 15 bp, Homo sapiens
agaccagggctgccc

SEQ ID NO: 185842 - DNA, 15 bp, Homo sapiens
gaccagggctgcccg

SEQ ID NO: 185843 - DNA, 15 bp, Homo sapiens
accagggctgcccga

SEQ ID NO: 185844 - DNA, 15 bp, Homo sapiens
ccagggctgcccgat

SEQ ID NO: 185845 - DNA, 15 bp, Homo sapiens
cagggctgcccgatg

SEQ ID NO: 185846 - DNA, 15 bp, Homo sapiens
agggctgcccgatgc

SEQ ID NO: 185847 - DNA, 15 bp, Homo sapiens
gggctgcccgatgcg

SEQ ID NO: 185848 - DNA, 15 bp, Homo sapiens
ggctgcccgatgcgt

SEQ ID NO: 185849 - DNA, 15 bp, Homo sapiens
gctgcccgatgcgtg

SEQ ID NO: 185850 - DNA, 15 bp, Homo sapiens
ctgcccgatgcgtga

SEQ ID NO: 185851 - DNA, 15 bp, Homo sapiens
tgcccgatgcgtgat

SEQ ID NO: 185852 - DNA, 15 bp, Homo sapiens
gcccgatgcgtgatc

SEQ ID NO: 185853 - DNA, 15 bp, Homo sapiens
cccgatgcgtgatca

SEQ ID NO: 185854 - DNA, 15 bp, Homo sapiens
ccgatgcgtgatcac

SEQ ID NO: 185855 - DNA, 15 bp, Homo sapiens
cgatgcgtgatcaca

SEQ ID NO: 185856 - DNA, 15 bp, Homo sapiens
gatgcgtgatcacag

SEQ ID NO: 185857 - DNA, 15 bp, Homo sapiens
atgcgtgatcacaga

SEQ ID NO: 185858 - DNA, 15 bp, Homo sapiens
tgcgtgatcacagag

SEQ ID NO: 185859 - DNA, 15 bp, Homo sapiens
gcgtgatcacagagc

SEQ ID NO: 185860 - DNA, 15 bp, Homo sapiens
cgtgatcacagagcc

SEQ ID NO: 185861 - DNA, 15 bp, Homo sapiens
gtgatcacagagcca

SEQ ID NO: 185862 - DNA, 15 bp, Homo sapiens
tgatcacagagccac

SEQ ID NO: 185863 - DNA, 15 bp, Homo sapiens
gatcacagagccaca

SEQ ID NO: 185864 - DNA, 15 bp, Homo sapiens
atcacagagccacat

SEQ ID NO: 185865 - DNA, 15 bp, Homo sapiens
tcacagagccacatt

SEQ ID NO: 185866 - DNA, 15 bp, Homo sapiens
cacagagccacattg

SEQ ID NO: 185867 - DNA, 15 bp, Homo sapiens
acagagccacattgt

SEQ ID NO: 185868 - DNA, 15 bp, Homo sapiens
cagagccacattgtg

SEQ ID NO: 185869 - DNA, 15 bp, Homo sapiens
agagccacattgtgc

SEQ ID NO: 185870 - DNA, 15 bp, Homo sapiens
gagccacattgtgcc

SEQ ID NO: 185871 - DNA, 15 bp, Homo sapiens
agccacattgtgcct

SEQ ID NO: 185872 - DNA, 15 bp, Homo sapiens
gccacattgtgcctg

SEQ ID NO: 185873 - DNA, 15 bp, Homo sapiens
ccacattgtgcctgc

SEQ ID NO: 185874 - DNA, 15 bp, Homo sapiens
cacattgtgcctgca

SEQ ID NO: 185875 - DNA, 15 bp, Homo sapiens
acattgtgcctgcaa

SEQ ID NO: 185876 - DNA, 15 bp, Homo sapiens
cattgtgcctgcaag

SEQ ID NO: 185877 - DNA, 15 bp, Homo sapiens
attgtgcctgcaagt

SEQ ID NO: 185878 - DNA, 15 bp, Homo sapiens
ttgtgcctgcaagtg

SEQ ID NO: 185879 - DNA, 15 bp, Homo sapiens
tgtgcctgcaagtgt

SEQ ID NO: 185880 - DNA, 15 bp, Homo sapiens
gtgcctgcaagtgta

SEQ ID NO: 185881 - DNA, 15 bp, Homo sapiens
tgcctgcaagtgtag

SEQ ID NO: 185882 - DNA, 15 bp, Homo sapiens
gcctgcaagtgtagc

SEQ ID NO: 185883 - DNA, 15 bp, Homo sapiens
cctgcaagtgtagca

SEQ ID NO: 185884 - DNA, 15 bp, Homo sapiens
ctgcaagtgtagcaa

SEQ ID NO: 185885 - DNA, 15 bp, Homo sapiens
tgcaagtgtagcaag

SEQ ID NO: 185886 - DNA, 15 bp, Homo sapiens
gcaagtgtagcaagc

SEQ ID NO: 185887 - DNA, 15 bp, Homo sapiens
caagtgtagcaagcc

SEQ ID NO: 185888 - DNA, 15 bp, Homo sapiens
aagtgtagcaagccc

SEQ ID NO: 185889 - DNA, 15 bp, Homo sapiens
agtgtagcaagcccc

SEQ ID NO: 185890 - DNA, 15 bp, Homo sapiens
gtgtagcaagcccct

SEQ ID NO: 185891 - DNA, 15 bp, Homo sapiens
tgtagcaagcccctt

SEQ ID NO: 185892 - DNA, 15 bp, Homo sapiens
gtagcaagccccttt

SEQ ID NO: 185893 - DNA, 15 bp, Homo sapiens
tagcaagcccctttc

SEQ ID NO: 185894 - DNA, 15 bp, Homo sapiens
agcaagcccctttcc

SEQ ID NO: 185895 - DNA, 15 bp, Homo sapiens
gcaagcccctttccc

SEQ ID NO: 185896 - DNA, 15 bp, Homo sapiens
caagcccctttccct

SEQ ID NO: 185897 - DNA, 15 bp, Homo sapiens
aagcccctttccctt

SEQ ID NO: 185898 - DNA, 15 bp, Homo sapiens
agcccctttcccttc

SEQ ID NO: 185899 - DNA, 15 bp, Homo sapiens
gcccctttcccttct

SEQ ID NO: 185900 - DNA, 15 bp, Homo sapiens
cccctttcccttctt

SEQ ID NO: 185901 - DNA, 15 bp, Homo sapiens
ccctttcccttcttc

SEQ ID NO: 185902 - DNA, 15 bp, Homo sapiens
cctttcccttcttca

SEQ ID NO: 185903 - DNA, 15 bp, Homo sapiens
ctttcccttcttcac

SEQ ID NO: 185904 - DNA, 15 bp, Homo sapiens
tttcccttcttcacc

SEQ ID NO: 185905 - DNA, 15 bp, Homo sapiens
ttcccttcttcacca

SEQ ID NO: 185906 - DNA, 15 bp, Homo sapiens
tcccttcttcaccac

SEQ ID NO: 185907 - DNA, 15 bp, Homo sapiens
cccttcttcaccacc

SEQ ID NO: 185908 - DNA, 15 bp, Homo sapiens
ccttcttcaccacct

SEQ ID NO: 185909 - DNA, 15 bp, Homo sapiens
cttcttcaccacctc

SEQ ID NO: 185910 - DNA, 15 bp, Homo sapiens
ttcttcaccacctcc

SEQ ID NO: 185911 - DNA, 15 bp, Homo sapiens
tcttcaccacctcct

SEQ ID NO: 185912 - DNA, 15 bp, Homo sapiens
cttcaccacctcctc

SEQ ID NO: 185913 - DNA, 15 bp, Homo sapiens
ttcaccacctcctct

SEQ ID NO: 185914 - DNA, 15 bp, Homo sapiens
tcaccacctcctctg

SEQ ID NO: 185915 - DNA, 15 bp, Homo sapiens
caccacctcctctgc

SEQ ID NO: 185916 - DNA, 15 bp, Homo sapiens
accacctcctctgct

SEQ ID NO: 185917 - DNA, 15 bp, Homo sapiens
ccacctcctctgctc

SEQ ID NO: 185918 - DNA, 15 bp, Homo sapiens
cacctcctctgctcc

SEQ ID NO: 185919 - DNA, 15 bp, Homo sapiens
acctcctctgctcct

SEQ ID NO: 185920 - DNA, 15 bp, Homo sapiens
cctcctctgctcctg

SEQ ID NO: 185921 - DNA, 15 bp, Homo sapiens
ctcctctgctcctgc

SEQ ID NO: 185922 - DNA, 15 bp, Homo sapiens
tcctctgctcctgcc

SEQ ID NO: 185923 - DNA, 15 bp, Homo sapiens
cctctgctcctgccc

SEQ ID NO: 185924 - DNA, 15 bp, Homo sapiens
ctctgctcctgccca

SEQ ID NO: 185925 - DNA, 15 bp, Homo sapiens
tctgctcctgcccag

SEQ ID NO: 185926 - DNA, 15 bp, Homo sapiens
ctgctcctgcccagc

SEQ ID NO: 185927 - DNA, 15 bp, Homo sapiens
tgctcctgcccagca

SEQ ID NO: 185928 - DNA, 15 bp, Homo sapiens
gctcctgcccagcaa

SEQ ID NO: 185929 - DNA, 15 bp, Homo sapiens
ctcctgcccagcaag

SEQ ID NO: 185930 - DNA, 15 bp, Homo sapiens
tcctgcccagcaaga

SEQ ID NO: 185931 - DNA, 15 bp, Homo sapiens
cctgcccagcaagac

SEQ ID NO: 185932 - DNA, 15 bp, Homo sapiens
ctgcccagcaagact

SEQ ID NO: 185933 - DNA, 15 bp, Homo sapiens
tgcccagcaagactg

SEQ ID NO: 185934 - DNA, 15 bp, Homo sapiens
gcccagcaagactgt

SEQ ID NO: 185935 - DNA, 15 bp, Homo sapiens
cccagcaagactgtg

SEQ ID NO: 185936 - DNA, 15 bp, Homo sapiens
ccagcaagactgtgg

SEQ ID NO: 185937 - DNA, 15 bp, Homo sapiens
cagcaagactgtggg

SEQ ID NO: 185938 - DNA, 15 bp, Homo sapiens
agcaagactgtgggc

SEQ ID NO: 185939 - DNA, 15 bp, Homo sapiens
gcaagactgtgggct

SEQ ID NO: 185940 - DNA, 15 bp, Homo sapiens
caagactgtgggctg

SEQ ID NO: 185941 - DNA, 15 bp, Homo sapiens
aagactgtgggctgt

SEQ ID NO: 185942 - DNA, 15 bp, Homo sapiens
agactgtgggctgtc

SEQ ID NO: 185943 - DNA, 15 bp, Homo sapiens
gactgtgggctgtct

SEQ ID NO: 185944 - DNA, 15 bp, Homo sapiens
actgtgggctgtctt

SEQ ID NO: 185945 - DNA, 15 bp, Homo sapiens
ctgtgggctgtcttc

SEQ ID NO: 185946 - DNA, 15 bp, Homo sapiens
tgtgggctgtcttcg

SEQ ID NO: 185947 - DNA, 15 bp, Homo sapiens
gtgggctgtcttcgg

SEQ ID NO: 185948 - DNA, 15 bp, Homo sapiens
tgggctgtcttcgga

SEQ ID NO: 185949 - DNA, 15 bp, Homo sapiens
gggctgtcttcggag

SEQ ID NO: 185950 - DNA, 15 bp, Homo sapiens
ggctgtcttcggaga

SEQ ID NO: 185951 - DNA, 15 bp, Homo sapiens
gctgtcttcggagag

SEQ ID NO: 185952 - DNA, 15 bp, Homo sapiens
ctgtcttcggagagg

SEQ ID NO: 185953 - DNA, 15 bp, Homo sapiens
tgtcttcggagagga

SEQ ID NO: 185954 - DNA, 15 bp, Homo sapiens
gtcttcggagaggag

SEQ ID NO: 185955 - DNA, 15 bp, Homo sapiens
tcttcggagaggaga

SEQ ID NO: 185956 - DNA, 15 bp, Homo sapiens
cttcggagaggagaa

SEQ ID NO: 185957 - DNA, 15 bp, Homo sapiens
ttcggagaggagaat

SEQ ID NO: 185958 - DNA, 15 bp, Homo sapiens
tcggagaggagaatg

SEQ ID NO: 185959 - DNA, 15 bp, Homo sapiens
cggagaggagaatgc

SEQ ID NO: 185960 - DNA, 15 bp, Homo sapiens
ggagaggagaatgcg

SEQ ID NO: 185961 - DNA, 15 bp, Homo sapiens
gagaggagaatgcgc

SEQ ID NO: 185962 - DNA, 15 bp, Homo sapiens
agaggagaatgcgct

SEQ ID NO: 185963 - DNA, 15 bp, Homo sapiens
gaggagaatgcgctg

SEQ ID NO: 185964 - DNA, 15 bp, Homo sapiens
aggagaatgcgctgg

SEQ ID NO: 185965 - DNA, 15 bp, Homo sapiens
ggagaatgcgctgga

SEQ ID NO: 185966 - DNA, 15 bp, Homo sapiens
gagaatgcgctggag

SEQ ID NO: 185967 - DNA, 15 bp, Homo sapiens
agaatgcgctggagg

SEQ ID NO: 185968 - DNA, 15 bp, Homo sapiens
gaatgcgctggaggc

SEQ ID NO: 185969 - DNA, 15 bp, Homo sapiens
aatgcgctggaggca

SEQ ID NO: 185970 - DNA, 15 bp, Homo sapiens
atgcgctggaggcat

SEQ ID NO: 185971 - DNA, 15 bp, Homo sapiens
tgcgctggaggcata

SEQ ID NO: 185972 - DNA, 15 bp, Homo sapiens
gcgctggaggcatag

SEQ ID NO: 185973 - DNA, 15 bp, Homo sapiens
cgctggaggcataga

SEQ ID NO: 185974 - DNA, 15 bp, Homo sapiens
gctggaggcatagaa

SEQ ID NO: 185975 - DNA, 15 bp, Homo sapiens
ctggaggcatagaag

SEQ ID NO: 185976 - DNA, 15 bp, Homo sapiens
tggaggcatagaagc

SEQ ID NO: 185977 - DNA, 15 bp, Homo sapiens
ggaggcatagaagcg

SEQ ID NO: 185978 - DNA, 15 bp, Homo sapiens
gaggcatagaagcga

SEQ ID NO: 185979 - DNA, 15 bp, Homo sapiens
aggcatagaagcgag

SEQ ID NO: 185980 - DNA, 15 bp, Homo sapiens
ggcatagaagcgagg

SEQ ID NO: 185981 - DNA, 15 bp, Homo sapiens
gcatagaagcgaggt

SEQ ID NO: 185982 - DNA, 15 bp, Homo sapiens
catagaagcgaggtc

SEQ ID NO: 185983 - DNA, 15 bp, Homo sapiens
atagaagcgaggtcc

SEQ ID NO: 185984 - DNA, 15 bp, Homo sapiens
tagaagcgaggtcct

SEQ ID NO: 185985 - DNA, 15 bp, Homo sapiens
agaagcgaggtcctt

SEQ ID NO: 185986 - DNA, 15 bp, Homo sapiens
gaagcgaggtccttc

SEQ ID NO: 185987 - DNA, 15 bp, Homo sapiens
aagcgaggtccttca

SEQ ID NO: 185988 - DNA, 15 bp, Homo sapiens
agcgaggtccttcaa

SEQ ID NO: 185989 - DNA, 15 bp, Homo sapiens
gcgaggtccttcaag

SEQ ID NO: 185990 - DNA, 15 bp, Homo sapiens
cgaggtccttcaagg

SEQ ID NO: 185991 - DNA, 15 bp, Homo sapiens
gaggtccttcaaggg

SEQ ID NO: 185992 - DNA, 15 bp, Homo sapiens
aggtccttcaagggc

SEQ ID NO: 185993 - DNA, 15 bp, Homo sapiens
ggtccttcaagggcc

SEQ ID NO: 185994 - DNA, 15 bp, Homo sapiens
gtccttcaagggccc

SEQ ID NO: 185995 - DNA, 15 bp, Homo sapiens
tccttcaagggccca

SEQ ID NO: 185996 - DNA, 15 bp, Homo sapiens
ccttcaagggcccac

SEQ ID NO: 185997 - DNA, 15 bp, Homo sapiens
cttcaagggcccact

SEQ ID NO: 185998 - DNA, 15 bp, Homo sapiens
ttcaagggcccactt

SEQ ID NO: 185999 - DNA, 15 bp, Homo sapiens
tcaagggcccacttt

SEQ ID NO: 186000 - DNA, 15 bp, Homo sapiens
caagggcccactttg

SEQ ID NO: 186001 - DNA, 15 bp, Homo sapiens
aagggcccactttgg

SEQ ID NO: 186002 - DNA, 15 bp, Homo sapiens
agggcccactttgga

SEQ ID NO: 186003 - DNA, 15 bp, Homo sapiens
gggcccactttggag

SEQ ID NO: 186004 - DNA, 15 bp, Homo sapiens
ggcccactttggaga

SEQ ID NO: 186005 - DNA, 15 bp, Homo sapiens
gcccactttggagac

SEQ ID NO: 186006 - DNA, 15 bp, Homo sapiens
cccactttggagacc

SEQ ID NO: 186007 - DNA, 15 bp, Homo sapiens
ccactttggagacca

SEQ ID NO: 186008 - DNA, 15 bp, Homo sapiens
cactttggagaccaa

SEQ ID NO: 186009 - DNA, 15 bp, Homo sapiens
actttggagaccaac

SEQ ID NO: 186010 - DNA, 15 bp, Homo sapiens
ctttggagaccaacg

SEQ ID NO: 186011 - DNA, 15 bp, Homo sapiens
tttggagaccaacgt

SEQ ID NO: 186012 - DNA, 15 bp, Homo sapiens
ttggagaccaacgta

SEQ ID NO: 186013 - DNA, 15 bp, Homo sapiens
tggagaccaacgtaa

SEQ ID NO: 186014 - DNA, 15 bp, Homo sapiens
ggagaccaacgtaac

SEQ ID NO: 186015 - DNA, 15 bp, Homo sapiens
gagaccaacgtaact

SEQ ID NO: 186016 - DNA, 15 bp, Homo sapiens
agaccaacgtaactg

SEQ ID NO: 186017 - DNA, 15 bp, Homo sapiens
gaccaacgtaactgg

SEQ ID NO: 186018 - DNA, 15 bp, Homo sapiens
accaacgtaactggg

SEQ ID NO: 186019 - DNA, 15 bp, Homo sapiens
ccaacgtaactgggc

SEQ ID NO: 186020 - DNA, 15 bp, Homo sapiens
caacgtaactgggca

SEQ ID NO: 186021 - DNA, 15 bp, Homo sapiens
aacgtaactgggcac

SEQ ID NO: 186022 - DNA, 15 bp, Homo sapiens
acgtaactgggcact

SEQ ID NO: 186023 - DNA, 15 bp, Homo sapiens
cgtaactgggcacta

SEQ ID NO: 186024 - DNA, 15 bp, Homo sapiens
gtaactgggcactag

SEQ ID NO: 186025 - DNA, 15 bp, Homo sapiens
taactgggcactagt

SEQ ID NO: 186026 - DNA, 15 bp, Homo sapiens
aactgggcactagtc

SEQ ID NO: 186027 - DNA, 15 bp, Homo sapiens
actgggcactagtcc

SEQ ID NO: 186028 - DNA, 15 bp, Homo sapiens
ctgggcactagtccc

SEQ ID NO: 186029 - DNA, 15 bp, Homo sapiens
tgggcactagtccca

SEQ ID NO: 186030 - DNA, 15 bp, Homo sapiens
gggcactagtcccag

SEQ ID NO: 186031 - DNA, 15 bp, Homo sapiens
ggcactagtcccagc

SEQ ID NO: 186032 - DNA, 15 bp, Homo sapiens
gcactagtcccagct

SEQ ID NO: 186033 - DNA, 15 bp, Homo sapiens
cactagtcccagctc

SEQ ID NO: 186034 - DNA, 15 bp, Homo sapiens
actagtcccagctct

SEQ ID NO: 186035 - DNA, 15 bp, Homo sapiens
ctagtcccagctctg

SEQ ID NO: 186036 - DNA, 15 bp, Homo sapiens
tagtcccagctctgt

SEQ ID NO: 186037 - DNA, 15 bp, Homo sapiens
agtcccagctctgtc

SEQ ID NO: 186038 - DNA, 15 bp, Homo sapiens
gtcccagctctgtct

SEQ ID NO: 186039 - DNA, 15 bp, Homo sapiens
tcccagctctgtctc

SEQ ID NO: 186040 - DNA, 15 bp, Homo sapiens
cccagctctgtctcc

SEQ ID NO: 186041 - DNA, 15 bp, Homo sapiens
ccagctctgtctcct

SEQ ID NO: 186042 - DNA, 15 bp, Homo sapiens
cagctctgtctcctt

SEQ ID NO: 186043 - DNA, 15 bp, Homo sapiens
agctctgtctccttt

SEQ ID NO: 186044 - DNA, 15 bp, Homo sapiens
gctctgtctcctttt

SEQ ID NO: 186045 - DNA, 15 bp, Homo sapiens
ctctgtctccttttt

SEQ ID NO: 186046 - DNA, 15 bp, Homo sapiens
tctgtctccttttta

SEQ ID NO: 186047 - DNA, 15 bp, Homo sapiens
ctgtctcctttttag

SEQ ID NO: 186048 - DNA, 15 bp, Homo sapiens
tgtctcctttttagc

SEQ ID NO: 186049 - DNA, 15 bp, Homo sapiens
gtctcctttttagct

SEQ ID NO: 186050 - DNA, 15 bp, Homo sapiens
tctcctttttagctc

SEQ ID NO: 186051 - DNA, 15 bp, Homo sapiens
ctcctttttagctcc

SEQ ID NO: 186052 - DNA, 15 bp, Homo sapiens
tcctttttagctcct

SEQ ID NO: 186053 - DNA, 15 bp, Homo sapiens
cctttttagctcctc

SEQ ID NO: 186054 - DNA, 15 bp, Homo sapiens
ctttttagctcctct

SEQ ID NO: 186055 - DNA, 15 bp, Homo sapiens
tttttagctcctctc

SEQ ID NO: 186056 - DNA, 15 bp, Homo sapiens
ttttagctcctctct

SEQ ID NO: 186057 - DNA, 15 bp, Homo sapiens
tttagctcctctctg

SEQ ID NO: 186058 - DNA, 15 bp, Homo sapiens
ttagctcctctctgt

SEQ ID NO: 186059 - DNA, 15 bp, Homo sapiens
tagctcctctctgtg

SEQ ID NO: 186060 - DNA, 15 bp, Homo sapiens
agctcctctctgtgc

SEQ ID NO: 186061 - DNA, 15 bp, Homo sapiens
gctcctctctgtgcc

SEQ ID NO: 186062 - DNA, 15 bp, Homo sapiens
ctcctctctgtgcct

SEQ ID NO: 186063 - DNA, 15 bp, Homo sapiens
tcctctctgtgcctc

SEQ ID NO: 186064 - DNA, 15 bp, Homo sapiens
cctctctgtgcctcg

SEQ ID NO: 186065 - DNA, 15 bp, Homo sapiens
ctctctgtgcctcgg

SEQ ID NO: 186066 - DNA, 15 bp, Homo sapiens
tctctgtgcctcggt

SEQ ID NO: 186067 - DNA, 15 bp, Homo sapiens
ctctgtgcctcggtc

SEQ ID NO: 186068 - DNA, 15 bp, Homo sapiens
tctgtgcctcggtcc

SEQ ID NO: 186069 - DNA, 15 bp, Homo sapiens
ctgtgcctcggtcca

SEQ ID NO: 186070 - DNA, 15 bp, Homo sapiens
tgtgcctcggtccag

SEQ ID NO: 186071 - DNA, 15 bp, Homo sapiens
gtgcctcggtccagc

SEQ ID NO: 186072 - DNA, 15 bp, Homo sapiens
tgcctcggtccagct

SEQ ID NO: 186073 - DNA, 15 bp, Homo sapiens
gcctcggtccagctg

SEQ ID NO: 186074 - DNA, 15 bp, Homo sapiens
cctcggtccagctgc

SEQ ID NO: 186075 - DNA, 15 bp, Homo sapiens
ctcggtccagctgca

SEQ ID NO: 186076 - DNA, 15 bp, Homo sapiens
tcggtccagctgcac

SEQ ID NO: 186077 - DNA, 15 bp, Homo sapiens
cggtccagctgcaca

SEQ ID NO: 186078 - DNA, 15 bp, Homo sapiens
ggtccagctgcacaa

SEQ ID NO: 186079 - DNA, 15 bp, Homo sapiens
gtccagctgcacaac

SEQ ID NO: 186080 - DNA, 15 bp, Homo sapiens
tccagctgcacaacg

SEQ ID NO: 186081 - DNA, 15 bp, Homo sapiens
ccagctgcacaacgg

SEQ ID NO: 186082 - DNA, 15 bp, Homo sapiens
cagctgcacaacggg

SEQ ID NO: 186083 - DNA, 15 bp, Homo sapiens
agctgcacaacgggg

SEQ ID NO: 186084 - DNA, 15 bp, Homo sapiens
gctgcacaacggggc

SEQ ID NO: 186085 - DNA, 15 bp, Homo sapiens
ctgcacaacggggca

SEQ ID NO: 186086 - DNA, 15 bp, Homo sapiens
tgcacaacggggcat

SEQ ID NO: 186087 - DNA, 15 bp, Homo sapiens
gcacaacggggcatg

SEQ ID NO: 186088 - DNA, 15 bp, Homo sapiens
cacaacggggcatgg

SEQ ID NO: 186089 - DNA, 15 bp, Homo sapiens
acaacggggcatggc

SEQ ID NO: 186090 - DNA, 15 bp, Homo sapiens
caacggggcatggcc

SEQ ID NO: 186091 - DNA, 15 bp, Homo sapiens
aacggggcatggcct

SEQ ID NO: 186092 - DNA, 15 bp, Homo sapiens
acggggcatggcctg

SEQ ID NO: 186093 - DNA, 15 bp, Homo sapiens
cggggcatggcctgg

SEQ ID NO: 186094 - DNA, 15 bp, Homo sapiens
ggggcatggcctggc

SEQ ID NO: 186095 - DNA, 15 bp, Homo sapiens
gggcatggcctggcg

SEQ ID NO: 186096 - DNA, 15 bp, Homo sapiens
ggcatggcctggcgg

SEQ ID NO: 186097 - DNA, 15 bp, Homo sapiens
gcatggcctggcggg

SEQ ID NO: 186098 - DNA, 15 bp, Homo sapiens
catggcctggcgggg

SEQ ID NO: 186099 - DNA, 15 bp, Homo sapiens
atggcctggcggggc

SEQ ID NO: 186100 - DNA, 15 bp, Homo sapiens
tggcctggcggggca

SEQ ID NO: 186101 - DNA, 15 bp, Homo sapiens
ggcctggcggggcag

SEQ ID NO: 186102 - DNA, 15 bp, Homo sapiens
gcctggcggggcagg

SEQ ID NO: 186103 - DNA, 15 bp, Homo sapiens
cctggcggggcaggg

SEQ ID NO: 186104 - DNA, 15 bp, Homo sapiens
ctggcggggcagggg

SEQ ID NO: 186105 - DNA, 15 bp, Homo sapiens
tggcggggcaggggt

SEQ ID NO: 186106 - DNA, 15 bp, Homo sapiens
ggcggggcaggggtg

SEQ ID NO: 186107 - DNA, 15 bp, Homo sapiens
gcggggcaggggtgt

SEQ ID NO: 186108 - DNA, 15 bp, Homo sapiens
cggggcaggggtgtt

SEQ ID NO: 186109 - DNA, 15 bp, Homo sapiens
ggggcaggggtgttg

SEQ ID NO: 186110 - DNA, 15 bp, Homo sapiens
gggcaggggtgttgg

SEQ ID NO: 186111 - DNA, 15 bp, Homo sapiens
ggcaggggtgttggt

SEQ ID NO: 186112 - DNA, 15 bp, Homo sapiens
gcaggggtgttggtt

SEQ ID NO: 186113 - DNA, 15 bp, Homo sapiens
caggggtgttggttg

SEQ ID NO: 186114 - DNA, 15 bp, Homo sapiens
aggggtgttggttga

SEQ ID NO: 186115 - DNA, 15 bp, Homo sapiens
ggggtgttggttgag

SEQ ID NO: 186116 - DNA, 15 bp, Homo sapiens
gggtgttggttgaga

SEQ ID NO: 186117 - DNA, 15 bp, Homo sapiens
ggtgttggttgagag

SEQ ID NO: 186118 - DNA, 15 bp, Homo sapiens
gtgttggttgagagt

SEQ ID NO: 186119 - DNA, 15 bp, Homo sapiens
tgttggttgagagtg

SEQ ID NO: 186120 - DNA, 15 bp, Homo sapiens
gttggttgagagtgt

SEQ ID NO: 186121 - DNA, 15 bp, Homo sapiens
ttggttgagagtgta

SEQ ID NO: 186122 - DNA, 15 bp, Homo sapiens
tggttgagagtgtac

SEQ ID NO: 186123 - DNA, 15 bp, Homo sapiens
ggttgagagtgtact

SEQ ID NO: 186124 - DNA, 15 bp, Homo sapiens
gttgagagtgtactg

SEQ ID NO: 186125 - DNA, 15 bp, Homo sapiens
ttgagagtgtactgg

SEQ ID NO: 186126 - DNA, 15 bp, Homo sapiens
tgagagtgtactgga

SEQ ID NO: 186127 - DNA, 15 bp, Homo sapiens
gagagtgtactggaa

SEQ ID NO: 186128 - DNA, 15 bp, Homo sapiens
agagtgtactggaaa

SEQ ID NO: 186129 - DNA, 15 bp, Homo sapiens
gagtgtactggaaat

SEQ ID NO: 186130 - DNA, 15 bp, Homo sapiens
agtgtactggaaatg

SEQ ID NO: 186131 - DNA, 15 bp, Homo sapiens
gtgtactggaaatgc

SEQ ID NO: 186132 - DNA, 15 bp, Homo sapiens
tgtactggaaatgct

SEQ ID NO: 186133 - DNA, 15 bp, Homo sapiens
gtactggaaatgcta

SEQ ID NO: 186134 - DNA, 15 bp, Homo sapiens
tactggaaatgctag

SEQ ID NO: 186135 - DNA, 15 bp, Homo sapiens
actggaaatgctagg

SEQ ID NO: 186136 - DNA, 15 bp, Homo sapiens
ctggaaatgctaggc

SEQ ID NO: 186137 - DNA, 15 bp, Homo sapiens
tggaaatgctaggcc

SEQ ID NO: 186138 - DNA, 15 bp, Homo sapiens
ggaaatgctaggcca

SEQ ID NO: 186139 - DNA, 15 bp, Homo sapiens
gaaatgctaggccac

SEQ ID NO: 186140 - DNA, 15 bp, Homo sapiens
aaatgctaggccact

SEQ ID NO: 186141 - DNA, 15 bp, Homo sapiens
aatgctaggccactg

SEQ ID NO: 186142 - DNA, 15 bp, Homo sapiens
atgctaggccactgc

SEQ ID NO: 186143 - DNA, 15 bp, Homo sapiens
tgctaggccactgca

SEQ ID NO: 186144 - DNA, 15 bp, Homo sapiens
gctaggccactgcac

SEQ ID NO: 186145 - DNA, 15 bp, Homo sapiens
ctaggccactgcacc

SEQ ID NO: 186146 - DNA, 15 bp, Homo sapiens
taggccactgcacct

SEQ ID NO: 186147 - DNA, 15 bp, Homo sapiens
aggccactgcacctc

SEQ ID NO: 186148 - DNA, 15 bp, Homo sapiens
ggccactgcacctcc

SEQ ID NO: 186149 - DNA, 15 bp, Homo sapiens
gccactgcacctccg

SEQ ID NO: 186150 - DNA, 15 bp, Homo sapiens
ccactgcacctccgc

SEQ ID NO: 186151 - DNA, 15 bp, Homo sapiens
cactgcacctccgcg

SEQ ID NO: 186152 - DNA, 15 bp, Homo sapiens
actgcacctccgcgg

SEQ ID NO: 186153 - DNA, 15 bp, Homo sapiens
ctgcacctccgcgga

SEQ ID NO: 186154 - DNA, 15 bp, Homo sapiens
tgcacctccgcggac

SEQ ID NO: 186155 - DNA, 15 bp, Homo sapiens
gcacctccgcggaca

SEQ ID NO: 186156 - DNA, 15 bp, Homo sapiens
cacctccgcggacag

SEQ ID NO: 186157 - DNA, 15 bp, Homo sapiens
acctccgcggacagg

SEQ ID NO: 186158 - DNA, 15 bp, Homo sapiens
cctccgcggacaggt

SEQ ID NO: 186159 - DNA, 15 bp, Homo sapiens
ctccgcggacaggtg

SEQ ID NO: 186160 - DNA, 15 bp, Homo sapiens
tccgcggacaggtgt

SEQ ID NO: 186161 - DNA, 15 bp, Homo sapiens
ccgcggacaggtgtc

SEQ ID NO: 186162 - DNA, 15 bp, Homo sapiens
cgcggacaggtgtca

SEQ ID NO: 186163 - DNA, 15 bp, Homo sapiens
gcggacaggtgtcac

SEQ ID NO: 186164 - DNA, 15 bp, Homo sapiens
cggacaggtgtcacc

SEQ ID NO: 186165 - DNA, 15 bp, Homo sapiens
ggacaggtgtcaccc

SEQ ID NO: 186166 - DNA, 15 bp, Homo sapiens
gacaggtgtcaccca

SEQ ID NO: 186167 - DNA, 15 bp, Homo sapiens
acaggtgtcacccag

SEQ ID NO: 186168 - DNA, 15 bp, Homo sapiens
caggtgtcacccagg

SEQ ID NO: 186169 - DNA, 15 bp, Homo sapiens
aggtgtcacccaggg

SEQ ID NO: 186170 - DNA, 15 bp, Homo sapiens
ggtgtcacccagggc

SEQ ID NO: 186171 - DNA, 15 bp, Homo sapiens
gtgtcacccagggct

SEQ ID NO: 186172 - DNA, 15 bp, Homo sapiens
tgtcacccagggctc

SEQ ID NO: 186173 - DNA, 15 bp, Homo sapiens
gtcacccagggctca

SEQ ID NO: 186174 - DNA, 15 bp, Homo sapiens
tcacccagggctcac

SEQ ID NO: 186175 - DNA, 15 bp, Homo sapiens
cacccagggctcacc

SEQ ID NO: 186176 - DNA, 15 bp, Homo sapiens
acccagggctcaccc

SEQ ID NO: 186177 - DNA, 15 bp, Homo sapiens
cccagggctcacccc

SEQ ID NO: 186178 - DNA, 15 bp, Homo sapiens
ccagggctcacccct

SEQ ID NO: 186179 - DNA, 15 bp, Homo sapiens
cagggctcacccctg

SEQ ID NO: 186180 - DNA, 15 bp, Homo sapiens
agggctcacccctga

SEQ ID NO: 186181 - DNA, 15 bp, Homo sapiens
gggctcacccctgat

SEQ ID NO: 186182 - DNA, 15 bp, Homo sapiens
ggctcacccctgata

SEQ ID NO: 186183 - DNA, 15 bp, Homo sapiens
gctcacccctgatag

SEQ ID NO: 186184 - DNA, 15 bp, Homo sapiens
ctcacccctgatagg

SEQ ID NO: 186185 - DNA, 15 bp, Homo sapiens
tcacccctgataggc

SEQ ID NO: 186186 - DNA, 15 bp, Homo sapiens
cacccctgataggct

SEQ ID NO: 186187 - DNA, 15 bp, Homo sapiens
acccctgataggctg

SEQ ID NO: 186188 - DNA, 15 bp, Homo sapiens
cccctgataggctgg

SEQ ID NO: 186189 - DNA, 15 bp, Homo sapiens
ccctgataggctggg

SEQ ID NO: 186190 - DNA, 15 bp, Homo sapiens
cctgataggctgggg

SEQ ID NO: 186191 - DNA, 15 bp, Homo sapiens
ctgataggctggggc

SEQ ID NO: 186192 - DNA, 15 bp, Homo sapiens
tgataggctggggcg

SEQ ID NO: 186193 - DNA, 15 bp, Homo sapiens
gataggctggggcgc

SEQ ID NO: 186194 - DNA, 15 bp, Homo sapiens
ataggctggggcgct

SEQ ID NO: 186195 - DNA, 15 bp, Homo sapiens
taggctggggcgctg

SEQ ID NO: 186196 - DNA, 15 bp, Homo sapiens
aggctggggcgctgg

SEQ ID NO: 186197 - DNA, 15 bp, Homo sapiens
ggctggggcgctggg

SEQ ID NO: 186198 - DNA, 15 bp, Homo sapiens
gctggggcgctggga

SEQ ID NO: 186199 - DNA, 15 bp, Homo sapiens
ctggggcgctgggag

SEQ ID NO: 186200 - DNA, 15 bp, Homo sapiens
tggggcgctgggagg

SEQ ID NO: 186201 - DNA, 15 bp, Homo sapiens
ggggcgctgggaggc

SEQ ID NO: 186202 - DNA, 15 bp, Homo sapiens
gggcgctgggaggcc

SEQ ID NO: 186203 - DNA, 15 bp, Homo sapiens
ggcgctgggaggcca

SEQ ID NO: 186204 - DNA, 15 bp, Homo sapiens
gcgctgggaggccag

SEQ ID NO: 186205 - DNA, 15 bp, Homo sapiens
cgctgggaggccagc

SEQ ID NO: 186206 - DNA, 15 bp, Homo sapiens
gctgggaggccagcc

SEQ ID NO: 186207 - DNA, 15 bp, Homo sapiens
ctgggaggccagccc

SEQ ID NO: 186208 - DNA, 15 bp, Homo sapiens
tgggaggccagccct

SEQ ID NO: 186209 - DNA, 15 bp, Homo sapiens
gggaggccagccctc

SEQ ID NO: 186210 - DNA, 15 bp, Homo sapiens
ggaggccagccctca

SEQ ID NO: 186211 - DNA, 15 bp, Homo sapiens
gaggccagccctcaa

SEQ ID NO: 186212 - DNA, 15 bp, Homo sapiens
aggccagccctcaac

SEQ ID NO: 186213 - DNA, 15 bp, Homo sapiens
ggccagccctcaacc

SEQ ID NO: 186214 - DNA, 15 bp, Homo sapiens
gccagccctcaaccc

SEQ ID NO: 186215 - DNA, 15 bp, Homo sapiens
ccagccctcaaccct

SEQ ID NO: 186216 - DNA, 15 bp, Homo sapiens
cagccctcaaccctt

SEQ ID NO: 186217 - DNA, 15 bp, Homo sapiens
agccctcaacccttc

SEQ ID NO: 186218 - DNA, 15 bp, Homo sapiens
gccctcaacccttct

SEQ ID NO: 186219 - DNA, 15 bp, Homo sapiens
ccctcaacccttctg

SEQ ID NO: 186220 - DNA, 15 bp, Homo sapiens
cctcaacccttctgt

SEQ ID NO: 186221 - DNA, 15 bp, Homo sapiens
ctcaacccttctgtc

SEQ ID NO: 186222 - DNA, 15 bp, Homo sapiens
tcaacccttctgtct

SEQ ID NO: 186223 - DNA, 15 bp, Homo sapiens
caacccttctgtctc

SEQ ID NO: 186224 - DNA, 15 bp, Homo sapiens
aacccttctgtctca

SEQ ID NO: 186225 - DNA, 15 bp, Homo sapiens
acccttctgtctcac

SEQ ID NO: 186226 - DNA, 15 bp, Homo sapiens
cccttctgtctcacc

SEQ ID NO: 186227 - DNA, 15 bp, Homo sapiens
ccttctgtctcaccc

SEQ ID NO: 186228 - DNA, 15 bp, Homo sapiens
cttctgtctcaccct

SEQ ID NO: 186229 - DNA, 15 bp, Homo sapiens
ttctgtctcaccctc

SEQ ID NO: 186230 - DNA, 15 bp, Homo sapiens
tctgtctcaccctcc

SEQ ID NO: 186231 - DNA, 15 bp, Homo sapiens
ctgtctcaccctcca

SEQ ID NO: 186232 - DNA, 15 bp, Homo sapiens
tgtctcaccctccag

SEQ ID NO: 186233 - DNA, 15 bp, Homo sapiens
gtctcaccctccagc

SEQ ID NO: 186234 - DNA, 15 bp, Homo sapiens
tctcaccctccagcc

SEQ ID NO: 186235 - DNA, 15 bp, Homo sapiens
ctcaccctccagcct

SEQ ID NO: 186236 - DNA, 15 bp, Homo sapiens
tcaccctccagccta

SEQ ID NO: 186237 - DNA, 15 bp, Homo sapiens
caccctccagcctaa

SEQ ID NO: 186238 - DNA, 15 bp, Homo sapiens
accctccagcctaaa

SEQ ID NO: 186239 - DNA, 15 bp, Homo sapiens
ccctccagcctaaag

SEQ ID NO: 186240 - DNA, 15 bp, Homo sapiens
cctccagcctaaagc

SEQ ID NO: 186241 - DNA, 15 bp, Homo sapiens
ctccagcctaaagct

SEQ ID NO: 186242 - DNA, 15 bp, Homo sapiens
tccagcctaaagctc

SEQ ID NO: 186243 - DNA, 15 bp, Homo sapiens
ccagcctaaagctcc

SEQ ID NO: 186244 - DNA, 15 bp, Homo sapiens
cagcctaaagctcct

SEQ ID NO: 186245 - DNA, 15 bp, Homo sapiens
agcctaaagctcctt

SEQ ID NO: 186246 - DNA, 15 bp, Homo sapiens
gcctaaagctccttg

SEQ ID NO: 186247 - DNA, 15 bp, Homo sapiens
cctaaagctccttga

SEQ ID NO: 186248 - DNA, 15 bp, Homo sapiens
ctaaagctccttgac

SEQ ID NO: 186249 - DNA, 15 bp, Homo sapiens
taaagctccttgaca

SEQ ID NO: 186250 - DNA, 15 bp, Homo sapiens
aaagctccttgacaa

SEQ ID NO: 186251 - DNA, 15 bp, Homo sapiens
aagctccttgacaac

SEQ ID NO: 186252 - DNA, 15 bp, Homo sapiens
agctccttgacaact

SEQ ID NO: 186253 - DNA, 15 bp, Homo sapiens
gctccttgacaactg

SEQ ID NO: 186254 - DNA, 15 bp, Homo sapiens
ctccttgacaactgg

SEQ ID NO: 186255 - DNA, 15 bp, Homo sapiens
tccttgacaactggg

SEQ ID NO: 186256 - DNA, 15 bp, Homo sapiens
ccttgacaactggga

SEQ ID NO: 186257 - DNA, 15 bp, Homo sapiens
cttgacaactgggac

SEQ ID NO: 186258 - DNA, 15 bp, Homo sapiens
ttgacaactgggaca

SEQ ID NO: 186259 - DNA, 15 bp, Homo sapiens
tgacaactgggacag

SEQ ID NO: 186260 - DNA, 15 bp, Homo sapiens
gacaactgggacagc

SEQ ID NO: 186261 - DNA, 15 bp, Homo sapiens
acaactgggacagcg

SEQ ID NO: 186262 - DNA, 15 bp, Homo sapiens
caactgggacagcgt

SEQ ID NO: 186263 - DNA, 15 bp, Homo sapiens
aactgggacagcgtg

SEQ ID NO: 186264 - DNA, 15 bp, Homo sapiens
actgggacagcgtga

SEQ ID NO: 186265 - DNA, 15 bp, Homo sapiens
ctgggacagcgtgac

SEQ ID NO: 186266 - DNA, 15 bp, Homo sapiens
tgggacagcgtgacc

SEQ ID NO: 186267 - DNA, 15 bp, Homo sapiens
gggacagcgtgacct

SEQ ID NO: 186268 - DNA, 15 bp, Homo sapiens
ggacagcgtgacctc

SEQ ID NO: 186269 - DNA, 15 bp, Homo sapiens
gacagcgtgacctcc

SEQ ID NO: 186270 - DNA, 15 bp, Homo sapiens
acagcgtgacctcca

SEQ ID NO: 186271 - DNA, 15 bp, Homo sapiens
cagcgtgacctccac

SEQ ID NO: 186272 - DNA, 15 bp, Homo sapiens
agcgtgacctccacc

SEQ ID NO: 186273 - DNA, 15 bp, Homo sapiens
gcgtgacctccacct

SEQ ID NO: 186274 - DNA, 15 bp, Homo sapiens
cgtgacctccacctt

SEQ ID NO: 186275 - DNA, 15 bp, Homo sapiens
gtgacctccaccttc

SEQ ID NO: 186276 - DNA, 15 bp, Homo sapiens
tgacctccaccttca

SEQ ID NO: 186277 - DNA, 15 bp, Homo sapiens
gacctccaccttcag

SEQ ID NO: 186278 - DNA, 15 bp, Homo sapiens
acctccaccttcagc

SEQ ID NO: 186279 - DNA, 15 bp, Homo sapiens
cctccaccttcagca

SEQ ID NO: 186280 - DNA, 15 bp, Homo sapiens
ctccaccttcagcaa

SEQ ID NO: 186281 - DNA, 15 bp, Homo sapiens
tccaccttcagcaag

SEQ ID NO: 186282 - DNA, 15 bp, Homo sapiens
ccaccttcagcaagc

SEQ ID NO: 186283 - DNA, 15 bp, Homo sapiens
caccttcagcaagct

SEQ ID NO: 186284 - DNA, 15 bp, Homo sapiens
accttcagcaagctg

SEQ ID NO: 186285 - DNA, 15 bp, Homo sapiens
ccttcagcaagctgc

SEQ ID NO: 186286 - DNA, 15 bp, Homo sapiens
cttcagcaagctgcg

SEQ ID NO: 186287 - DNA, 15 bp, Homo sapiens
ttcagcaagctgcgc

SEQ ID NO: 186288 - DNA, 15 bp, Homo sapiens
tcagcaagctgcgcg

SEQ ID NO: 186289 - DNA, 15 bp, Homo sapiens
cagcaagctgcgcga

SEQ ID NO: 186290 - DNA, 15 bp, Homo sapiens
agcaagctgcgcgaa

SEQ ID NO: 186291 - DNA, 15 bp, Homo sapiens
gcaagctgcgcgaac

SEQ ID NO: 186292 - DNA, 15 bp, Homo sapiens
caagctgcgcgaaca

SEQ ID NO: 186293 - DNA, 15 bp, Homo sapiens
aagctgcgcgaacag

SEQ ID NO: 186294 - DNA, 15 bp, Homo sapiens
agctgcgcgaacagc

SEQ ID NO: 186295 - DNA, 15 bp, Homo sapiens
gctgcgcgaacagct

SEQ ID NO: 186296 - DNA, 15 bp, Homo sapiens
ctgcgcgaacagctc

SEQ ID NO: 186297 - DNA, 15 bp, Homo sapiens
tgcgcgaacagctcg

SEQ ID NO: 186298 - DNA, 15 bp, Homo sapiens
gcgcgaacagctcgg

SEQ ID NO: 186299 - DNA, 15 bp, Homo sapiens
cgcgaacagctcggc

SEQ ID NO: 186300 - DNA, 15 bp, Homo sapiens
gcgaacagctcggcc

SEQ ID NO: 186301 - DNA, 15 bp, Homo sapiens
cgaacagctcggccc

SEQ ID NO: 186302 - DNA, 15 bp, Homo sapiens
gaacagctcggccct

SEQ ID NO: 186303 - DNA, 15 bp, Homo sapiens
aacagctcggccctg

SEQ ID NO: 186304 - DNA, 15 bp, Homo sapiens
acagctcggccctgt

SEQ ID NO: 186305 - DNA, 15 bp, Homo sapiens
cagctcggccctgtg

SEQ ID NO: 186306 - DNA, 15 bp, Homo sapiens
agctcggccctgtga

SEQ ID NO: 186307 - DNA, 15 bp, Homo sapiens
gctcggccctgtgac

SEQ ID NO: 186308 - DNA, 15 bp, Homo sapiens
ctcggccctgtgacc

SEQ ID NO: 186309 - DNA, 15 bp, Homo sapiens
tcggccctgtgaccc

SEQ ID NO: 186310 - DNA, 15 bp, Homo sapiens
cggccctgtgaccca

SEQ ID NO: 186311 - DNA, 15 bp, Homo sapiens
ggccctgtgacccag

SEQ ID NO: 186312 - DNA, 15 bp, Homo sapiens
gccctgtgacccagg

SEQ ID NO: 186313 - DNA, 15 bp, Homo sapiens
ccctgtgacccagga

SEQ ID NO: 186314 - DNA, 15 bp, Homo sapiens
cctgtgacccaggag

SEQ ID NO: 186315 - DNA, 15 bp, Homo sapiens
ctgtgacccaggagt

SEQ ID NO: 186316 - DNA, 15 bp, Homo sapiens
tgtgacccaggagtt

SEQ ID NO: 186317 - DNA, 15 bp, Homo sapiens
gtgacccaggagttc

SEQ ID NO: 186318 - DNA, 15 bp, Homo sapiens
tgacccaggagttct

SEQ ID NO: 186319 - DNA, 15 bp, Homo sapiens
gacccaggagttctg

SEQ ID NO: 186320 - DNA, 15 bp, Homo sapiens
acccaggagttctgg

SEQ ID NO: 186321 - DNA, 15 bp, Homo sapiens
cccaggagttctggg

SEQ ID NO: 186322 - DNA, 15 bp, Homo sapiens
ccaggagttctggga

SEQ ID NO: 186323 - DNA, 15 bp, Homo sapiens
caggagttctgggat

SEQ ID NO: 186324 - DNA, 15 bp, Homo sapiens
aggagttctgggata

SEQ ID NO: 186325 - DNA, 15 bp, Homo sapiens
ggagttctgggataa

SEQ ID NO: 186326 - DNA, 15 bp, Homo sapiens
gagttctgggataac

SEQ ID NO: 186327 - DNA, 15 bp, Homo sapiens
agttctgggataacc

SEQ ID NO: 186328 - DNA, 15 bp, Homo sapiens
gttctgggataacct

SEQ ID NO: 186329 - DNA, 15 bp, Homo sapiens
ttctgggataacctg

SEQ ID NO: 186330 - DNA, 15 bp, Homo sapiens
tctgggataacctgg

SEQ ID NO: 186331 - DNA, 15 bp, Homo sapiens
ctgggataacctgga

SEQ ID NO: 186332 - DNA, 15 bp, Homo sapiens
tgggataacctggaa

SEQ ID NO: 186333 - DNA, 15 bp, Homo sapiens
gggataacctggaaa

SEQ ID NO: 186334 - DNA, 15 bp, Homo sapiens
ggataacctggaaaa

SEQ ID NO: 186335 - DNA, 15 bp, Homo sapiens
gataacctggaaaag

SEQ ID NO: 186336 - DNA, 15 bp, Homo sapiens
ataacctggaaaagg

SEQ ID NO: 186337 - DNA, 15 bp, Homo sapiens
taacctggaaaagga

SEQ ID NO: 186338 - DNA, 15 bp, Homo sapiens
aacctggaaaaggag

SEQ ID NO: 186339 - DNA, 15 bp, Homo sapiens
acctggaaaaggaga

SEQ ID NO: 186340 - DNA, 15 bp, Homo sapiens
cctggaaaaggagac

SEQ ID NO: 186341 - DNA, 15 bp, Homo sapiens
ctggaaaaggagaca

SEQ ID NO: 186342 - DNA, 15 bp, Homo sapiens
tggaaaaggagacag

SEQ ID NO: 186343 - DNA, 15 bp, Homo sapiens
ggaaaaggagacaga

SEQ ID NO: 186344 - DNA, 15 bp, Homo sapiens
gaaaaggagacagag

SEQ ID NO: 186345 - DNA, 15 bp, Homo sapiens
aaaaggagacagagg

SEQ ID NO: 186346 - DNA, 15 bp, Homo sapiens
aaaggagacagaggg

SEQ ID NO: 186347 - DNA, 15 bp, Homo sapiens
aaggagacagagggc

SEQ ID NO: 186348 - DNA, 15 bp, Homo sapiens
aggagacagagggcc

SEQ ID NO: 186349 - DNA, 15 bp, Homo sapiens
ggagacagagggcct

SEQ ID NO: 186350 - DNA, 15 bp, Homo sapiens
gagacagagggcctg

SEQ ID NO: 186351 - DNA, 15 bp, Homo sapiens
agacagagggcctga

SEQ ID NO: 186352 - DNA, 15 bp, Homo sapiens
gacagagggcctgag

SEQ ID NO: 186353 - DNA, 15 bp, Homo sapiens
acagagggcctgagg

SEQ ID NO: 186354 - DNA, 15 bp, Homo sapiens
cagagggcctgaggc

SEQ ID NO: 186355 - DNA, 15 bp, Homo sapiens
agagggcctgaggca

SEQ ID NO: 186356 - DNA, 15 bp, Homo sapiens
gagggcctgaggcag

SEQ ID NO: 186357 - DNA, 15 bp, Homo sapiens
agggcctgaggcagg

SEQ ID NO: 186358 - DNA, 15 bp, Homo sapiens
gggcctgaggcagga

SEQ ID NO: 186359 - DNA, 15 bp, Homo sapiens
ggcctgaggcaggag

SEQ ID NO: 186360 - DNA, 15 bp, Homo sapiens
gcctgaggcaggaga

SEQ ID NO: 186361 - DNA, 15 bp, Homo sapiens
cctgaggcaggagat

SEQ ID NO: 186362 - DNA, 15 bp, Homo sapiens
ctgaggcaggagatg

SEQ ID NO: 186363 - DNA, 15 bp, Homo sapiens
tgaggcaggagatga

SEQ ID NO: 186364 - DNA, 15 bp, Homo sapiens
gaggcaggagatgag

SEQ ID NO: 186365 - DNA, 15 bp, Homo sapiens
aggcaggagatgagc

SEQ ID NO: 186366 - DNA, 15 bp, Homo sapiens
ggcaggagatgagca

SEQ ID NO: 186367 - DNA, 15 bp, Homo sapiens
gcaggagatgagcaa

SEQ ID NO: 186368 - DNA, 15 bp, Homo sapiens
caggagatgagcaag

SEQ ID NO: 186369 - DNA, 15 bp, Homo sapiens
aggagatgagcaagg

SEQ ID NO: 186370 - DNA, 15 bp, Homo sapiens
ggagatgagcaagga

SEQ ID NO: 186371 - DNA, 15 bp, Homo sapiens
gagatgagcaaggat

SEQ ID NO: 186372 - DNA, 15 bp, Homo sapiens
agatgagcaaggatc

SEQ ID NO: 186373 - DNA, 15 bp, Homo sapiens
gatgagcaaggatct

SEQ ID NO: 186374 - DNA, 15 bp, Homo sapiens
atgagcaaggatctg

SEQ ID NO: 186375 - DNA, 15 bp, Homo sapiens
tgagcaaggatctgg

SEQ ID NO: 186376 - DNA, 15 bp, Homo sapiens
gagcaaggatctgga

SEQ ID NO: 186377 - DNA, 15 bp, Homo sapiens
agcaaggatctggag

SEQ ID NO: 186378 - DNA, 15 bp, Homo sapiens
gcaaggatctggagg

SEQ ID NO: 186379 - DNA, 15 bp, Homo sapiens
caaggatctggagga

SEQ ID NO: 186380 - DNA, 15 bp, Homo sapiens
aaggatctggaggag

SEQ ID NO: 186381 - DNA, 15 bp, Homo sapiens
aggatctggaggagg

SEQ ID NO: 186382 - DNA, 15 bp, Homo sapiens
ggatctggaggaggt

SEQ ID NO: 186383 - DNA, 15 bp, Homo sapiens
gatctggaggaggtg

SEQ ID NO: 186384 - DNA, 15 bp, Homo sapiens
atctggaggaggtga

SEQ ID NO: 186385 - DNA, 15 bp, Homo sapiens
tctggaggaggtgaa

SEQ ID NO: 186386 - DNA, 15 bp, Homo sapiens
ctggaggaggtgaag

SEQ ID NO: 186387 - DNA, 15 bp, Homo sapiens
tggaggaggtgaagg

SEQ ID NO: 186388 - DNA, 15 bp, Homo sapiens
ggaggaggtgaaggc

SEQ ID NO: 186389 - DNA, 15 bp, Homo sapiens
gaggaggtgaaggcc

SEQ ID NO: 186390 - DNA, 15 bp, Homo sapiens
aggaggtgaaggcca

SEQ ID NO: 186391 - DNA, 15 bp, Homo sapiens
ggaggtgaaggccaa

SEQ ID NO: 186392 - DNA, 15 bp, Homo sapiens
gaggtgaaggccaag

SEQ ID NO: 186393 - DNA, 15 bp, Homo sapiens
aggtgaaggccaagg

SEQ ID NO: 186394 - DNA, 15 bp, Homo sapiens
ggtgaaggccaaggt

SEQ ID NO: 186395 - DNA, 15 bp, Homo sapiens
gtgaaggccaaggtg

SEQ ID NO: 186396 - DNA, 15 bp, Homo sapiens
tgaaggccaaggtgc

SEQ ID NO: 186397 - DNA, 15 bp, Homo sapiens
gaaggccaaggtgca

SEQ ID NO: 186398 - DNA, 15 bp, Homo sapiens
aaggccaaggtgcag

SEQ ID NO: 186399 - DNA, 15 bp, Homo sapiens
aggccaaggtgcagc

SEQ ID NO: 186400 - DNA, 15 bp, Homo sapiens
ggccaaggtgcagcc

SEQ ID NO: 186401 - DNA, 15 bp, Homo sapiens
gccaaggtgcagccc

SEQ ID NO: 186402 - DNA, 15 bp, Homo sapiens
ccaaggtgcagccct

SEQ ID NO: 186403 - DNA, 15 bp, Homo sapiens
caaggtgcagcccta

SEQ ID NO: 186404 - DNA, 15 bp, Homo sapiens
aaggtgcagccctac

SEQ ID NO: 186405 - DNA, 15 bp, Homo sapiens
aggtgcagccctacc

SEQ ID NO: 186406 - DNA, 15 bp, Homo sapiens
ggtgcagccctacct

SEQ ID NO: 186407 - DNA, 15 bp, Homo sapiens
gtgcagccctacctg

SEQ ID NO: 186408 - DNA, 15 bp, Homo sapiens
tgcagccctacctgg

SEQ ID NO: 186409 - DNA, 15 bp, Homo sapiens
gcagccctacctgga

SEQ ID NO: 186410 - DNA, 15 bp, Homo sapiens
cagccctacctggac

SEQ ID NO: 186411 - DNA, 15 bp, Homo sapiens
agccctacctggacg

SEQ ID NO: 186412 - DNA, 15 bp, Homo sapiens
gccctacctggacga

SEQ ID NO: 186413 - DNA, 15 bp, Homo sapiens
ccctacctggacgac

SEQ ID NO: 186414 - DNA, 15 bp, Homo sapiens
cctacctggacgact

SEQ ID NO: 186415 - DNA, 15 bp, Homo sapiens
ctacctggacgactt

SEQ ID NO: 186416 - DNA, 15 bp, Homo sapiens
tacctggacgacttc

SEQ ID NO: 186417 - DNA, 15 bp, Homo sapiens
acctggacgacttcc

SEQ ID NO: 186418 - DNA, 15 bp, Homo sapiens
cctggacgacttcca

SEQ ID NO: 186419 - DNA, 15 bp, Homo sapiens
ctggacgacttccag

SEQ ID NO: 186420 - DNA, 15 bp, Homo sapiens
tggacgacttccaga

SEQ ID NO: 186421 - DNA, 15 bp, Homo sapiens
ggacgacttccagaa

SEQ ID NO: 186422 - DNA, 15 bp, Homo sapiens
gacgacttccagaag

SEQ ID NO: 186423 - DNA, 15 bp, Homo sapiens
acgacttccagaaga

SEQ ID NO: 186424 - DNA, 15 bp, Homo sapiens
cgacttccagaagaa

SEQ ID NO: 186425 - DNA, 15 bp, Homo sapiens
gacttccagaagaag

SEQ ID NO: 186426 - DNA, 15 bp, Homo sapiens
acttccagaagaagt

SEQ ID NO: 186427 - DNA, 15 bp, Homo sapiens
cttccagaagaagtg

SEQ ID NO: 186428 - DNA, 15 bp, Homo sapiens
ttccagaagaagtgg

SEQ ID NO: 186429 - DNA, 15 bp, Homo sapiens
tccagaagaagtggc

SEQ ID NO: 186430 - DNA, 15 bp, Homo sapiens
ccagaagaagtggca

SEQ ID NO: 186431 - DNA, 15 bp, Homo sapiens
cagaagaagtggcag

SEQ ID NO: 186432 - DNA, 15 bp, Homo sapiens
agaagaagtggcagg

SEQ ID NO: 186433 - DNA, 15 bp, Homo sapiens
gaagaagtggcagga

SEQ ID NO: 186434 - DNA, 15 bp, Homo sapiens
aagaagtggcaggag

SEQ ID NO: 186435 - DNA, 15 bp, Homo sapiens
agaagtggcaggagg

SEQ ID NO: 186436 - DNA, 15 bp, Homo sapiens
gaagtggcaggagga

SEQ ID NO: 186437 - DNA, 15 bp, Homo sapiens
aagtggcaggaggag

SEQ ID NO: 186438 - DNA, 15 bp, Homo sapiens
agtggcaggaggaga

SEQ ID NO: 186439 - DNA, 15 bp, Homo sapiens
gtggcaggaggagat

SEQ ID NO: 186440 - DNA, 15 bp, Homo sapiens
tggcaggaggagatg

SEQ ID NO: 186441 - DNA, 15 bp, Homo sapiens
ggcaggaggagatgg

SEQ ID NO: 186442 - DNA, 15 bp, Homo sapiens
gcaggaggagatgga

SEQ ID NO: 186443 - DNA, 15 bp, Homo sapiens
caggaggagatggag

SEQ ID NO: 186444 - DNA, 15 bp, Homo sapiens
aggaggagatggagc

SEQ ID NO: 186445 - DNA, 15 bp, Homo sapiens
ggaggagatggagct

SEQ ID NO: 186446 - DNA, 15 bp, Homo sapiens
gaggagatggagctc

SEQ ID NO: 186447 - DNA, 15 bp, Homo sapiens
aggagatggagctct

SEQ ID NO: 186448 - DNA, 15 bp, Homo sapiens
ggagatggagctcta

SEQ ID NO: 186449 - DNA, 15 bp, Homo sapiens
gagatggagctctac

SEQ ID NO: 186450 - DNA, 15 bp, Homo sapiens
agatggagctctacc

SEQ ID NO: 186451 - DNA, 15 bp, Homo sapiens
gatggagctctaccg

SEQ ID NO: 186452 - DNA, 15 bp, Homo sapiens
atggagctctaccgc

SEQ ID NO: 186453 - DNA, 15 bp, Homo sapiens
tggagctctaccgcc

SEQ ID NO: 186454 - DNA, 15 bp, Homo sapiens
ggagctctaccgcca

SEQ ID NO: 186455 - DNA, 15 bp, Homo sapiens
gagctctaccgccag

SEQ ID NO: 186456 - DNA, 15 bp, Homo sapiens
agctctaccgccaga

SEQ ID NO: 186457 - DNA, 15 bp, Homo sapiens
gctctaccgccagaa

SEQ ID NO: 186458 - DNA, 15 bp, Homo sapiens
ctctaccgccagaag

SEQ ID NO: 186459 - DNA, 15 bp, Homo sapiens
tctaccgccagaagg

SEQ ID NO: 186460 - DNA, 15 bp, Homo sapiens
ctaccgccagaaggt

SEQ ID NO: 186461 - DNA, 15 bp, Homo sapiens
taccgccagaaggtg

SEQ ID NO: 186462 - DNA, 15 bp, Homo sapiens
accgccagaaggtgg

SEQ ID NO: 186463 - DNA, 15 bp, Homo sapiens
ccgccagaaggtgga

SEQ ID NO: 186464 - DNA, 15 bp, Homo sapiens
cgccagaaggtggag

SEQ ID NO: 186465 - DNA, 15 bp, Homo sapiens
gccagaaggtggagc

SEQ ID NO: 186466 - DNA, 15 bp, Homo sapiens
ccagaaggtggagcc

SEQ ID NO: 186467 - DNA, 15 bp, Homo sapiens
cagaaggtggagccg

SEQ ID NO: 186468 - DNA, 15 bp, Homo sapiens
agaaggtggagccgc

SEQ ID NO: 186469 - DNA, 15 bp, Homo sapiens
gaaggtggagccgct

SEQ ID NO: 186470 - DNA, 15 bp, Homo sapiens
aaggtggagccgctg

SEQ ID NO: 186471 - DNA, 15 bp, Homo sapiens
aggtggagccgctgc

SEQ ID NO: 186472 - DNA, 15 bp, Homo sapiens
ggtggagccgctgcg

SEQ ID NO: 186473 - DNA, 15 bp, Homo sapiens
gtggagccgctgcgc

SEQ ID NO: 186474 - DNA, 15 bp, Homo sapiens
tggagccgctgcgcg

SEQ ID NO: 186475 - DNA, 15 bp, Homo sapiens
ggagccgctgcgcgc

SEQ ID NO: 186476 - DNA, 15 bp, Homo sapiens
gagccgctgcgcgca

SEQ ID NO: 186477 - DNA, 15 bp, Homo sapiens
agccgctgcgcgcag

SEQ ID NO: 186478 - DNA, 15 bp, Homo sapiens
gccgctgcgcgcaga

SEQ ID NO: 186479 - DNA, 15 bp, Homo sapiens
ccgctgcgcgcagag

SEQ ID NO: 186480 - DNA, 15 bp, Homo sapiens
cgctgcgcgcagagc

SEQ ID NO: 186481 - DNA, 15 bp, Homo sapiens
gctgcgcgcagagct

SEQ ID NO: 186482 - DNA, 15 bp, Homo sapiens
ctgcgcgcagagctc

SEQ ID NO: 186483 - DNA, 15 bp, Homo sapiens
tgcgcgcagagctcc

SEQ ID NO: 186484 - DNA, 15 bp, Homo sapiens
gcgcgcagagctcca

SEQ ID NO: 186485 - DNA, 15 bp, Homo sapiens
cgcgcagagctccaa

SEQ ID NO: 186486 - DNA, 15 bp, Homo sapiens
gcgcagagctccaag

SEQ ID NO: 186487 - DNA, 15 bp, Homo sapiens
cgcagagctccaaga

SEQ ID NO: 186488 - DNA, 15 bp, Homo sapiens
gcagagctccaagag

SEQ ID NO: 186489 - DNA, 15 bp, Homo sapiens
cagagctccaagagg

SEQ ID NO: 186490 - DNA, 15 bp, Homo sapiens
agagctccaagaggg

SEQ ID NO: 186491 - DNA, 15 bp, Homo sapiens
gagctccaagagggc

SEQ ID NO: 186492 - DNA, 15 bp, Homo sapiens
agctccaagagggcg

SEQ ID NO: 186493 - DNA, 15 bp, Homo sapiens
gctccaagagggcgc

SEQ ID NO: 186494 - DNA, 15 bp, Homo sapiens
ctccaagagggcgcg

SEQ ID NO: 186495 - DNA, 15 bp, Homo sapiens
tccaagagggcgcgc

SEQ ID NO: 186496 - DNA, 15 bp, Homo sapiens
ccaagagggcgcgcg

SEQ ID NO: 186497 - DNA, 15 bp, Homo sapiens
caagagggcgcgcgc

SEQ ID NO: 186498 - DNA, 15 bp, Homo sapiens
aagagggcgcgcgcc

SEQ ID NO: 186499 - DNA, 15 bp, Homo sapiens
agagggcgcgcgcca

SEQ ID NO: 186500 - DNA, 15 bp, Homo sapiens
gagggcgcgcgccag

SEQ ID NO: 186501 - DNA, 15 bp, Homo sapiens
agggcgcgcgccaga

SEQ ID NO: 186502 - DNA, 15 bp, Homo sapiens
gggcgcgcgccagaa

SEQ ID NO: 186503 - DNA, 15 bp, Homo sapiens
ggcgcgcgccagaag

SEQ ID NO: 186504 - DNA, 15 bp, Homo sapiens
gcgcgcgccagaagc

SEQ ID NO: 186505 - DNA, 15 bp, Homo sapiens
cgcgcgccagaagct

SEQ ID NO: 186506 - DNA, 15 bp, Homo sapiens
gcgcgccagaagctg

SEQ ID NO: 186507 - DNA, 15 bp, Homo sapiens
cgcgccagaagctgc

SEQ ID NO: 186508 - DNA, 15 bp, Homo sapiens
gcgccagaagctgca

SEQ ID NO: 186509 - DNA, 15 bp, Homo sapiens
cgccagaagctgcac

SEQ ID NO: 186510 - DNA, 15 bp, Homo sapiens
gccagaagctgcacg

SEQ ID NO: 186511 - DNA, 15 bp, Homo sapiens
ccagaagctgcacga

SEQ ID NO: 186512 - DNA, 15 bp, Homo sapiens
cagaagctgcacgag

SEQ ID NO: 186513 - DNA, 15 bp, Homo sapiens
agaagctgcacgagc

SEQ ID NO: 186514 - DNA, 15 bp, Homo sapiens
gaagctgcacgagct

SEQ ID NO: 186515 - DNA, 15 bp, Homo sapiens
aagctgcacgagctg

SEQ ID NO: 186516 - DNA, 15 bp, Homo sapiens
agctgcacgagctgc

SEQ ID NO: 186517 - DNA, 15 bp, Homo sapiens
gctgcacgagctgca

SEQ ID NO: 186518 - DNA, 15 bp, Homo sapiens
ctgcacgagctgcaa

SEQ ID NO: 186519 - DNA, 15 bp, Homo sapiens
tgcacgagctgcaag

SEQ ID NO: 186520 - DNA, 15 bp, Homo sapiens
gcacgagctgcaaga

SEQ ID NO: 186521 - DNA, 15 bp, Homo sapiens
cacgagctgcaagag

SEQ ID NO: 186522 - DNA, 15 bp, Homo sapiens
acgagctgcaagaga

SEQ ID NO: 186523 - DNA, 15 bp, Homo sapiens
cgagctgcaagagaa

SEQ ID NO: 186524 - DNA, 15 bp, Homo sapiens
gagctgcaagagaag

SEQ ID NO: 186525 - DNA, 15 bp, Homo sapiens
agctgcaagagaagc

SEQ ID NO: 186526 - DNA, 15 bp, Homo sapiens
gctgcaagagaagct

SEQ ID NO: 186527 - DNA, 15 bp, Homo sapiens
ctgcaagagaagctg

SEQ ID NO: 186528 - DNA, 15 bp, Homo sapiens
tgcaagagaagctga

SEQ ID NO: 186529 - DNA, 15 bp, Homo sapiens
gcaagagaagctgag

SEQ ID NO: 186530 - DNA, 15 bp, Homo sapiens
caagagaagctgagc

SEQ ID NO: 186531 - DNA, 15 bp, Homo sapiens
aagagaagctgagcc

SEQ ID NO: 186532 - DNA, 15 bp, Homo sapiens
agagaagctgagccc

SEQ ID NO: 186533 - DNA, 15 bp, Homo sapiens
gagaagctgagccca

SEQ ID NO: 186534 - DNA, 15 bp, Homo sapiens
agaagctgagcccac

SEQ ID NO: 186535 - DNA, 15 bp, Homo sapiens
gaagctgagcccact

SEQ ID NO: 186536 - DNA, 15 bp, Homo sapiens
aagctgagcccactg

SEQ ID NO: 186537 - DNA, 15 bp, Homo sapiens
agctgagcccactgg

SEQ ID NO: 186538 - DNA, 15 bp, Homo sapiens
gctgagcccactggg

SEQ ID NO: 186539 - DNA, 15 bp, Homo sapiens
ctgagcccactgggc

SEQ ID NO: 186540 - DNA, 15 bp, Homo sapiens
tgagcccactgggcg

SEQ ID NO: 186541 - DNA, 15 bp, Homo sapiens
gagcccactgggcga

SEQ ID NO: 186542 - DNA, 15 bp, Homo sapiens
agcccactgggcgag

SEQ ID NO: 186543 - DNA, 15 bp, Homo sapiens
gcccactgggcgagg

SEQ ID NO: 186544 - DNA, 15 bp, Homo sapiens
cccactgggcgagga

SEQ ID NO: 186545 - DNA, 15 bp, Homo sapiens
ccactgggcgaggag

SEQ ID NO: 186546 - DNA, 15 bp, Homo sapiens
cactgggcgaggaga

SEQ ID NO: 186547 - DNA, 15 bp, Homo sapiens
actgggcgaggagat

SEQ ID NO: 186548 - DNA, 15 bp, Homo sapiens
ctgggcgaggagatg

SEQ ID NO: 186549 - DNA, 15 bp, Homo sapiens
tgggcgaggagatgc

SEQ ID NO: 186550 - DNA, 15 bp, Homo sapiens
gggcgaggagatgcg

SEQ ID NO: 186551 - DNA, 15 bp, Homo sapiens
ggcgaggagatgcgc

SEQ ID NO: 186552 - DNA, 15 bp, Homo sapiens
gcgaggagatgcgcg

SEQ ID NO: 186553 - DNA, 15 bp, Homo sapiens
cgaggagatgcgcga

SEQ ID NO: 186554 - DNA, 15 bp, Homo sapiens
gaggagatgcgcgac

SEQ ID NO: 186555 - DNA, 15 bp, Homo sapiens
aggagatgcgcgacc

SEQ ID NO: 186556 - DNA, 15 bp, Homo sapiens
ggagatgcgcgaccg

SEQ ID NO: 186557 - DNA, 15 bp, Homo sapiens
gagatgcgcgaccgc

SEQ ID NO: 186558 - DNA, 15 bp, Homo sapiens
agatgcgcgaccgcg

SEQ ID NO: 186559 - DNA, 15 bp, Homo sapiens
gatgcgcgaccgcgc

SEQ ID NO: 186560 - DNA, 15 bp, Homo sapiens
atgcgcgaccgcgcg

SEQ ID NO: 186561 - DNA, 15 bp, Homo sapiens
tgcgcgaccgcgcgc

SEQ ID NO: 186562 - DNA, 15 bp, Homo sapiens
gcgcgaccgcgcgcg

SEQ ID NO: 186563 - DNA, 15 bp, Homo sapiens
cgcgaccgcgcgcgc

SEQ ID NO: 186564 - DNA, 15 bp, Homo sapiens
gcgaccgcgcgcgcg

SEQ ID NO: 186565 - DNA, 15 bp, Homo sapiens
cgaccgcgcgcgcgc

SEQ ID NO: 186566 - DNA, 15 bp, Homo sapiens
gaccgcgcgcgcgcc

SEQ ID NO: 186567 - DNA, 15 bp, Homo sapiens
accgcgcgcgcgccc

SEQ ID NO: 186568 - DNA, 15 bp, Homo sapiens
ccgcgcgcgcgccca

SEQ ID NO: 186569 - DNA, 15 bp, Homo sapiens
cgcgcgcgcgcccat

SEQ ID NO: 186570 - DNA, 15 bp, Homo sapiens
gcgcgcgcgcccatg

SEQ ID NO: 186571 - DNA, 15 bp, Homo sapiens
cgcgcgcgcccatgt

SEQ ID NO: 186572 - DNA, 15 bp, Homo sapiens
gcgcgcgcccatgtg

SEQ ID NO: 186573 - DNA, 15 bp, Homo sapiens
cgcgcgcccatgtgg

SEQ ID NO: 186574 - DNA, 15 bp, Homo sapiens
gcgcgcccatgtgga

SEQ ID NO: 186575 - DNA, 15 bp, Homo sapiens
cgcgcccatgtggac

SEQ ID NO: 186576 - DNA, 15 bp, Homo sapiens
gcgcccatgtggacg

SEQ ID NO: 186577 - DNA, 15 bp, Homo sapiens
cgcccatgtggacgc

SEQ ID NO: 186578 - DNA, 15 bp, Homo sapiens
gcccatgtggacgcg

SEQ ID NO: 186579 - DNA, 15 bp, Homo sapiens
cccatgtggacgcgc

SEQ ID NO: 186580 - DNA, 15 bp, Homo sapiens
ccatgtggacgcgct

SEQ ID NO: 186581 - DNA, 15 bp, Homo sapiens
catgtggacgcgctg

SEQ ID NO: 186582 - DNA, 15 bp, Homo sapiens
atgtggacgcgctgc

SEQ ID NO: 186583 - DNA, 15 bp, Homo sapiens
tgtggacgcgctgcg

SEQ ID NO: 186584 - DNA, 15 bp, Homo sapiens
gtggacgcgctgcgc

SEQ ID NO: 186585 - DNA, 15 bp, Homo sapiens
tggacgcgctgcgca

SEQ ID NO: 186586 - DNA, 15 bp, Homo sapiens
ggacgcgctgcgcac

SEQ ID NO: 186587 - DNA, 15 bp, Homo sapiens
gacgcgctgcgcacg

SEQ ID NO: 186588 - DNA, 15 bp, Homo sapiens
acgcgctgcgcacgc

SEQ ID NO: 186589 - DNA, 15 bp, Homo sapiens
cgcgctgcgcacgca

SEQ ID NO: 186590 - DNA, 15 bp, Homo sapiens
gcgctgcgcacgcat

SEQ ID NO: 186591 - DNA, 15 bp, Homo sapiens
cgctgcgcacgcatc

SEQ ID NO: 186592 - DNA, 15 bp, Homo sapiens
gctgcgcacgcatct

SEQ ID NO: 186593 - DNA, 15 bp, Homo sapiens
ctgcgcacgcatctg

SEQ ID NO: 186594 - DNA, 15 bp, Homo sapiens
tgcgcacgcatctgg

SEQ ID NO: 186595 - DNA, 15 bp, Homo sapiens
gcgcacgcatctggc

SEQ ID NO: 186596 - DNA, 15 bp, Homo sapiens
cgcacgcatctggcc

SEQ ID NO: 186597 - DNA, 15 bp, Homo sapiens
gcacgcatctggccc

SEQ ID NO: 186598 - DNA, 15 bp, Homo sapiens
cacgcatctggcccc

SEQ ID NO: 186599 - DNA, 15 bp, Homo sapiens
acgcatctggccccc

SEQ ID NO: 186600 - DNA, 15 bp, Homo sapiens
cgcatctggccccct

SEQ ID NO: 186601 - DNA, 15 bp, Homo sapiens
gcatctggcccccta

SEQ ID NO: 186602 - DNA, 15 bp, Homo sapiens
catctggccccctac

SEQ ID NO: 186603 - DNA, 15 bp, Homo sapiens
atctggccccctaca

SEQ ID NO: 186604 - DNA, 15 bp, Homo sapiens
tctggccccctacag

SEQ ID NO: 186605 - DNA, 15 bp, Homo sapiens
ctggccccctacagc

SEQ ID NO: 186606 - DNA, 15 bp, Homo sapiens
tggccccctacagcg

SEQ ID NO: 186607 - DNA, 15 bp, Homo sapiens
ggccccctacagcga

SEQ ID NO: 186608 - DNA, 15 bp, Homo sapiens
gccccctacagcgac

SEQ ID NO: 186609 - DNA, 15 bp, Homo sapiens
ccccctacagcgacg

SEQ ID NO: 186610 - DNA, 15 bp, Homo sapiens
cccctacagcgacga

SEQ ID NO: 186611 - DNA, 15 bp, Homo sapiens
ccctacagcgacgag

SEQ ID NO: 186612 - DNA, 15 bp, Homo sapiens
cctacagcgacgagc

SEQ ID NO: 186613 - DNA, 15 bp, Homo sapiens
ctacagcgacgagct

SEQ ID NO: 186614 - DNA, 15 bp, Homo sapiens
tacagcgacgagctg

SEQ ID NO: 186615 - DNA, 15 bp, Homo sapiens
acagcgacgagctgc

SEQ ID NO: 186616 - DNA, 15 bp, Homo sapiens
cagcgacgagctgcg

SEQ ID NO: 186617 - DNA, 15 bp, Homo sapiens
agcgacgagctgcgc

SEQ ID NO: 186618 - DNA, 15 bp, Homo sapiens
gcgacgagctgcgcc

SEQ ID NO: 186619 - DNA, 15 bp, Homo sapiens
cgacgagctgcgcca

SEQ ID NO: 186620 - DNA, 15 bp, Homo sapiens
gacgagctgcgccag

SEQ ID NO: 186621 - DNA, 15 bp, Homo sapiens
acgagctgcgccagc

SEQ ID NO: 186622 - DNA, 15 bp, Homo sapiens
cgagctgcgccagcg

SEQ ID NO: 186623 - DNA, 15 bp, Homo sapiens
gagctgcgccagcgc

SEQ ID NO: 186624 - DNA, 15 bp, Homo sapiens
agctgcgccagcgct

SEQ ID NO: 186625 - DNA, 15 bp, Homo sapiens
gctgcgccagcgctt

SEQ ID NO: 186626 - DNA, 15 bp, Homo sapiens
ctgcgccagcgcttg

SEQ ID NO: 186627 - DNA, 15 bp, Homo sapiens
tgcgccagcgcttgg

SEQ ID NO: 186628 - DNA, 15 bp, Homo sapiens
gcgccagcgcttggc

SEQ ID NO: 186629 - DNA, 15 bp, Homo sapiens
cgccagcgcttggcc

SEQ ID NO: 186630 - DNA, 15 bp, Homo sapiens
gccagcgcttggccg

SEQ ID NO: 186631 - DNA, 15 bp, Homo sapiens
ccagcgcttggccgc

SEQ ID NO: 186632 - DNA, 15 bp, Homo sapiens
cagcgcttggccgcg

SEQ ID NO: 186633 - DNA, 15 bp, Homo sapiens
agcgcttggccgcgc

SEQ ID NO: 186634 - DNA, 15 bp, Homo sapiens
gcgcttggccgcgcg

SEQ ID NO: 186635 - DNA, 15 bp, Homo sapiens
cgcttggccgcgcgc

SEQ ID NO: 186636 - DNA, 15 bp, Homo sapiens
gcttggccgcgcgcc

SEQ ID NO: 186637 - DNA, 15 bp, Homo sapiens
cttggccgcgcgcct

SEQ ID NO: 186638 - DNA, 15 bp, Homo sapiens
ttggccgcgcgcctt

SEQ ID NO: 186639 - DNA, 15 bp, Homo sapiens
tggccgcgcgccttg

SEQ ID NO: 186640 - DNA, 15 bp, Homo sapiens
ggccgcgcgccttga

SEQ ID NO: 186641 - DNA, 15 bp, Homo sapiens
gccgcgcgccttgag

SEQ ID NO: 186642 - DNA, 15 bp, Homo sapiens
ccgcgcgccttgagg

SEQ ID NO: 186643 - DNA, 15 bp, Homo sapiens
cgcgcgccttgaggc

SEQ ID NO: 186644 - DNA, 15 bp, Homo sapiens
gcgcgccttgaggct

SEQ ID NO: 186645 - DNA, 15 bp, Homo sapiens
cgcgccttgaggctc

SEQ ID NO: 186646 - DNA, 15 bp, Homo sapiens
gcgccttgaggctct

SEQ ID NO: 186647 - DNA, 15 bp, Homo sapiens
cgccttgaggctctc

SEQ ID NO: 186648 - DNA, 15 bp, Homo sapiens
gccttgaggctctca

SEQ ID NO: 186649 - DNA, 15 bp, Homo sapiens
ccttgaggctctcaa

SEQ ID NO: 186650 - DNA, 15 bp, Homo sapiens
cttgaggctctcaag

SEQ ID NO: 186651 - DNA, 15 bp, Homo sapiens
ttgaggctctcaagg

SEQ ID NO: 186652 - DNA, 15 bp, Homo sapiens
tgaggctctcaagga

SEQ ID NO: 186653 - DNA, 15 bp, Homo sapiens
gaggctctcaaggag

SEQ ID NO: 186654 - DNA, 15 bp, Homo sapiens
aggctctcaaggaga

SEQ ID NO: 186655 - DNA, 15 bp, Homo sapiens
ggctctcaaggagaa

SEQ ID NO: 186656 - DNA, 15 bp, Homo sapiens
gctctcaaggagaac

SEQ ID NO: 186657 - DNA, 15 bp, Homo sapiens
ctctcaaggagaacg

SEQ ID NO: 186658 - DNA, 15 bp, Homo sapiens
tctcaaggagaacgg

SEQ ID NO: 186659 - DNA, 15 bp, Homo sapiens
ctcaaggagaacggc

SEQ ID NO: 186660 - DNA, 15 bp, Homo sapiens
tcaaggagaacggcg

SEQ ID NO: 186661 - DNA, 15 bp, Homo sapiens
caaggagaacggcgg

SEQ ID NO: 186662 - DNA, 15 bp, Homo sapiens
aaggagaacggcggc

SEQ ID NO: 186663 - DNA, 15 bp, Homo sapiens
aggagaacggcggcg

SEQ ID NO: 186664 - DNA, 15 bp, Homo sapiens
ggagaacggcggcgc

SEQ ID NO: 186665 - DNA, 15 bp, Homo sapiens
gagaacggcggcgcc

SEQ ID NO: 186666 - DNA, 15 bp, Homo sapiens
agaacggcggcgcca

SEQ ID NO: 186667 - DNA, 15 bp, Homo sapiens
gaacggcggcgccag

SEQ ID NO: 186668 - DNA, 15 bp, Homo sapiens
aacggcggcgccaga

SEQ ID NO: 186669 - DNA, 15 bp, Homo sapiens
acggcggcgccagac

SEQ ID NO: 186670 - DNA, 15 bp, Homo sapiens
cggcggcgccagact

SEQ ID NO: 186671 - DNA, 15 bp, Homo sapiens
ggcggcgccagactg

SEQ ID NO: 186672 - DNA, 15 bp, Homo sapiens
gcggcgccagactgg

SEQ ID NO: 186673 - DNA, 15 bp, Homo sapiens
cggcgccagactggc

SEQ ID NO: 186674 - DNA, 15 bp, Homo sapiens
ggcgccagactggcc

SEQ ID NO: 186675 - DNA, 15 bp, Homo sapiens
gcgccagactggccg

SEQ ID NO: 186676 - DNA, 15 bp, Homo sapiens
cgccagactggccga

SEQ ID NO: 186677 - DNA, 15 bp, Homo sapiens
cagactggccgagta

SEQ ID NO: 186678 - DNA, 15 bp, Homo sapiens
agactggccgagtac

SEQ ID NO: 186679 - DNA, 15 bp, Homo sapiens
gactggccgagtacc

SEQ ID NO: 186680 - DNA, 15 bp, Homo sapiens
actggccgagtacca

SEQ ID NO: 186681 - DNA, 15 bp, Homo sapiens
ctggccgagtaccac

SEQ ID NO: 186682 - DNA, 15 bp, Homo sapiens
tggccgagtaccacg

SEQ ID NO: 186683 - DNA, 15 bp, Homo sapiens
ggccgagtaccacgc

SEQ ID NO: 186684 - DNA, 15 bp, Homo sapiens
gccgagtaccacgcc

SEQ ID NO: 186685 - DNA, 15 bp, Homo sapiens
ccgagtaccacgcca

SEQ ID NO: 186686 - DNA, 15 bp, Homo sapiens
cgagtaccacgccaa

SEQ ID NO: 186687 - DNA, 15 bp, Homo sapiens
gagtaccacgccaag

SEQ ID NO: 186688 - DNA, 15 bp, Homo sapiens
agtaccacgccaagg

SEQ ID NO: 186689 - DNA, 15 bp, Homo sapiens
gtaccacgccaaggc

SEQ ID NO: 186690 - DNA, 15 bp, Homo sapiens
taccacgccaaggcc

SEQ ID NO: 186691 - DNA, 15 bp, Homo sapiens
accacgccaaggcca

SEQ ID NO: 186692 - DNA, 15 bp, Homo sapiens
ccacgccaaggccac

SEQ ID NO: 186693 - DNA, 15 bp, Homo sapiens
cacgccaaggccacc

SEQ ID NO: 186694 - DNA, 15 bp, Homo sapiens
acgccaaggccaccg

SEQ ID NO: 186695 - DNA, 15 bp, Homo sapiens
cgccaaggccaccga

SEQ ID NO: 186696 - DNA, 15 bp, Homo sapiens
gccaaggccaccgag

SEQ ID NO: 186697 - DNA, 15 bp, Homo sapiens
ccaaggccaccgagc

SEQ ID NO: 186698 - DNA, 15 bp, Homo sapiens
caaggccaccgagca

SEQ ID NO: 186699 - DNA, 15 bp, Homo sapiens
aaggccaccgagcat

SEQ ID NO: 186700 - DNA, 15 bp, Homo sapiens
aggccaccgagcatc

SEQ ID NO: 186701 - DNA, 15 bp, Homo sapiens
ggccaccgagcatct

SEQ ID NO: 186702 - DNA, 15 bp, Homo sapiens
gccaccgagcatctg

SEQ ID NO: 186703 - DNA, 15 bp, Homo sapiens
ccaccgagcatctga

SEQ ID NO: 186704 - DNA, 15 bp, Homo sapiens
caccgagcatctgag

SEQ ID NO: 186705 - DNA, 15 bp, Homo sapiens
accgagcatctgagc

SEQ ID NO: 186706 - DNA, 15 bp, Homo sapiens
ccgagcatctgagca

SEQ ID NO: 186707 - DNA, 15 bp, Homo sapiens
cgagcatctgagcac

SEQ ID NO: 186708 - DNA, 15 bp, Homo sapiens
gagcatctgagcacg

SEQ ID NO: 186709 - DNA, 15 bp, Homo sapiens
agcatctgagcacgc

SEQ ID NO: 186710 - DNA, 15 bp, Homo sapiens
gcatctgagcacgct

SEQ ID NO: 186711 - DNA, 15 bp, Homo sapiens
catctgagcacgctc

SEQ ID NO: 186712 - DNA, 15 bp, Homo sapiens
atctgagcacgctca

SEQ ID NO: 186713 - DNA, 15 bp, Homo sapiens
tctgagcacgctcag

SEQ ID NO: 186714 - DNA, 15 bp, Homo sapiens
ctgagcacgctcagc

SEQ ID NO: 186715 - DNA, 15 bp, Homo sapiens
tgagcacgctcagcg

SEQ ID NO: 186716 - DNA, 15 bp, Homo sapiens
gagcacgctcagcga

SEQ ID NO: 186717 - DNA, 15 bp, Homo sapiens
agcacgctcagcgag

SEQ ID NO: 186718 - DNA, 15 bp, Homo sapiens
gcacgctcagcgaga

SEQ ID NO: 186719 - DNA, 15 bp, Homo sapiens
cacgctcagcgagaa

SEQ ID NO: 186720 - DNA, 15 bp, Homo sapiens
acgctcagcgagaag

SEQ ID NO: 186721 - DNA, 15 bp, Homo sapiens
cgctcagcgagaagg

SEQ ID NO: 186722 - DNA, 15 bp, Homo sapiens
gctcagcgagaaggc

SEQ ID NO: 186723 - DNA, 15 bp, Homo sapiens
ctcagcgagaaggcc

SEQ ID NO: 186724 - DNA, 15 bp, Homo sapiens
tcagcgagaaggcca

SEQ ID NO: 186725 - DNA, 15 bp, Homo sapiens
cagcgagaaggccaa

SEQ ID NO: 186726 - DNA, 15 bp, Homo sapiens
agcgagaaggccaag

SEQ ID NO: 186727 - DNA, 15 bp, Homo sapiens
gcgagaaggccaagc

SEQ ID NO: 186728 - DNA, 15 bp, Homo sapiens
cgagaaggccaagcc

SEQ ID NO: 186729 - DNA, 15 bp, Homo sapiens
gagaaggccaagccc

SEQ ID NO: 186730 - DNA, 15 bp, Homo sapiens
agaaggccaagcccg

SEQ ID NO: 186731 - DNA, 15 bp, Homo sapiens
gaaggccaagcccgc

SEQ ID NO: 186732 - DNA, 15 bp, Homo sapiens
aaggccaagcccgcg

SEQ ID NO: 186733 - DNA, 15 bp, Homo sapiens
aggccaagcccgcgc

SEQ ID NO: 186734 - DNA, 15 bp, Homo sapiens
ggccaagcccgcgct

SEQ ID NO: 186735 - DNA, 15 bp, Homo sapiens
gccaagcccgcgctc

SEQ ID NO: 186736 - DNA, 15 bp, Homo sapiens
ccaagcccgcgctcg

SEQ ID NO: 186737 - DNA, 15 bp, Homo sapiens
caagcccgcgctcga

SEQ ID NO: 186738 - DNA, 15 bp, Homo sapiens
aagcccgcgctcgag

SEQ ID NO: 186739 - DNA, 15 bp, Homo sapiens
agcccgcgctcgagg

SEQ ID NO: 186740 - DNA, 15 bp, Homo sapiens
gcccgcgctcgagga

SEQ ID NO: 186741 - DNA, 15 bp, Homo sapiens
cccgcgctcgaggac

SEQ ID NO: 186742 - DNA, 15 bp, Homo sapiens
ccgcgctcgaggacc

SEQ ID NO: 186743 - DNA, 15 bp, Homo sapiens
cgcgctcgaggacct

SEQ ID NO: 186744 - DNA, 15 bp, Homo sapiens
gcgctcgaggacctc

SEQ ID NO: 186745 - DNA, 15 bp, Homo sapiens
cgctcgaggacctcc

SEQ ID NO: 186746 - DNA, 15 bp, Homo sapiens
gctcgaggacctccg

SEQ ID NO: 186747 - DNA, 15 bp, Homo sapiens
ctcgaggacctccgc

SEQ ID NO: 186748 - DNA, 15 bp, Homo sapiens
tcgaggacctccgcc

SEQ ID NO: 186749 - DNA, 15 bp, Homo sapiens
cgaggacctccgcca

SEQ ID NO: 186750 - DNA, 15 bp, Homo sapiens
gaggacctccgccaa

SEQ ID NO: 186751 - DNA, 15 bp, Homo sapiens
aggacctccgccaag

SEQ ID NO: 186752 - DNA, 15 bp, Homo sapiens
ggacctccgccaagg

SEQ ID NO: 186753 - DNA, 15 bp, Homo sapiens
gacctccgccaaggc

SEQ ID NO: 186754 - DNA, 15 bp, Homo sapiens
acctccgccaaggcc

SEQ ID NO: 186755 - DNA, 15 bp, Homo sapiens
cctccgccaaggcct

SEQ ID NO: 186756 - DNA, 15 bp, Homo sapiens
ctccgccaaggcctg

SEQ ID NO: 186757 - DNA, 15 bp, Homo sapiens
tccgccaaggcctgc

SEQ ID NO: 186758 - DNA, 15 bp, Homo sapiens
ccgccaaggcctgct

SEQ ID NO: 186759 - DNA, 15 bp, Homo sapiens
cgccaaggcctgctg

SEQ ID NO: 186760 - DNA, 15 bp, Homo sapiens
gccaaggcctgctgc

SEQ ID NO: 186761 - DNA, 15 bp, Homo sapiens
ccaaggcctgctgcc

SEQ ID NO: 186762 - DNA, 15 bp, Homo sapiens
caaggcctgctgccc

SEQ ID NO: 186763 - DNA, 15 bp, Homo sapiens
aaggcctgctgcccg

SEQ ID NO: 186764 - DNA, 15 bp, Homo sapiens
aggcctgctgcccgt

SEQ ID NO: 186765 - DNA, 15 bp, Homo sapiens
ggcctgctgcccgtg

SEQ ID NO: 186766 - DNA, 15 bp, Homo sapiens
gcctgctgcccgtgc

SEQ ID NO: 186767 - DNA, 15 bp, Homo sapiens
cctgctgcccgtgct

SEQ ID NO: 186768 - DNA, 15 bp, Homo sapiens
ctgctgcccgtgctg

SEQ ID NO: 186769 - DNA, 15 bp, Homo sapiens
tgctgcccgtgctgg

SEQ ID NO: 186770 - DNA, 15 bp, Homo sapiens
gctgcccgtgctgga

SEQ ID NO: 186771 - DNA, 15 bp, Homo sapiens
ctgcccgtgctggag

SEQ ID NO: 186772 - DNA, 15 bp, Homo sapiens
tgcccgtgctggaga

SEQ ID NO: 186773 - DNA, 15 bp, Homo sapiens
gcccgtgctggagag

SEQ ID NO: 186774 - DNA, 15 bp, Homo sapiens
cccgtgctggagagc

SEQ ID NO: 186775 - DNA, 15 bp, Homo sapiens
ccgtgctggagagct

SEQ ID NO: 186776 - DNA, 15 bp, Homo sapiens
cgtgctggagagctt

SEQ ID NO: 186777 - DNA, 15 bp, Homo sapiens
gtgctggagagcttc

SEQ ID NO: 186778 - DNA, 15 bp, Homo sapiens
tgctggagagcttca

SEQ ID NO: 186779 - DNA, 15 bp, Homo sapiens
gctggagagcttcaa

SEQ ID NO: 186780 - DNA, 15 bp, Homo sapiens
ctggagagcttcaag

SEQ ID NO: 186781 - DNA, 15 bp, Homo sapiens
tggagagcttcaagg

SEQ ID NO: 186782 - DNA, 15 bp, Homo sapiens
ggagagcttcaaggt

SEQ ID NO: 186783 - DNA, 15 bp, Homo sapiens
gagagcttcaaggtc

SEQ ID NO: 186784 - DNA, 15 bp, Homo sapiens
agagcttcaaggtca

SEQ ID NO: 186785 - DNA, 15 bp, Homo sapiens
gagcttcaaggtcag

SEQ ID NO: 186786 - DNA, 15 bp, Homo sapiens
agcttcaaggtcagc

SEQ ID NO: 186787 - DNA, 15 bp, Homo sapiens
gcttcaaggtcagct

SEQ ID NO: 186788 - DNA, 15 bp, Homo sapiens
cttcaaggtcagctt

SEQ ID NO: 186789 - DNA, 15 bp, Homo sapiens
ttcaaggtcagcttc

SEQ ID NO: 186790 - DNA, 15 bp, Homo sapiens
tcaaggtcagcttcc

SEQ ID NO: 186791 - DNA, 15 bp, Homo sapiens
caaggtcagcttcct

SEQ ID NO: 186792 - DNA, 15 bp, Homo sapiens
aaggtcagcttcctg

SEQ ID NO: 186793 - DNA, 15 bp, Homo sapiens
aggtcagcttcctga

SEQ ID NO: 186794 - DNA, 15 bp, Homo sapiens
ggtcagcttcctgag

SEQ ID NO: 186795 - DNA, 15 bp, Homo sapiens
gtcagcttcctgagc

SEQ ID NO: 186796 - DNA, 15 bp, Homo sapiens
tcagcttcctgagcg

SEQ ID NO: 186797 - DNA, 15 bp, Homo sapiens
cagcttcctgagcgc

SEQ ID NO: 186798 - DNA, 15 bp, Homo sapiens
agcttcctgagcgct

SEQ ID NO: 186799 - DNA, 15 bp, Homo sapiens
gcttcctgagcgctc

SEQ ID NO: 186800 - DNA, 15 bp, Homo sapiens
cttcctgagcgctct

SEQ ID NO: 186801 - DNA, 15 bp, Homo sapiens
ttcctgagcgctctc

SEQ ID NO: 186802 - DNA, 15 bp, Homo sapiens
tcctgagcgctctcg

SEQ ID NO: 186803 - DNA, 15 bp, Homo sapiens
cctgagcgctctcga

SEQ ID NO: 186804 - DNA, 15 bp, Homo sapiens
ctgagcgctctcgag

SEQ ID NO: 186805 - DNA, 15 bp, Homo sapiens
tgagcgctctcgagg

SEQ ID NO: 186806 - DNA, 15 bp, Homo sapiens
gagcgctctcgagga

SEQ ID NO: 186807 - DNA, 15 bp, Homo sapiens
agcgctctcgaggag

SEQ ID NO: 186808 - DNA, 15 bp, Homo sapiens
gcgctctcgaggagt

SEQ ID NO: 186809 - DNA, 15 bp, Homo sapiens
cgctctcgaggagta

SEQ ID NO: 186810 - DNA, 15 bp, Homo sapiens
gctctcgaggagtac

SEQ ID NO: 186811 - DNA, 15 bp, Homo sapiens
ctctcgaggagtaca

SEQ ID NO: 186812 - DNA, 15 bp, Homo sapiens
tctcgaggagtacac

SEQ ID NO: 186813 - DNA, 15 bp, Homo sapiens
ctcgaggagtacact

SEQ ID NO: 186814 - DNA, 15 bp, Homo sapiens
tcgaggagtacacta

SEQ ID NO: 186815 - DNA, 15 bp, Homo sapiens
cgaggagtacactaa

SEQ ID NO: 186816 - DNA, 15 bp, Homo sapiens
gaggagtacactaag

SEQ ID NO: 186817 - DNA, 15 bp, Homo sapiens
aggagtacactaaga

SEQ ID NO: 186818 - DNA, 15 bp, Homo sapiens
ggagtacactaagaa

SEQ ID NO: 186819 - DNA, 15 bp, Homo sapiens
gagtacactaagaag

SEQ ID NO: 186820 - DNA, 15 bp, Homo sapiens
agtacactaagaagc

SEQ ID NO: 186821 - DNA, 15 bp, Homo sapiens
gtacactaagaagct

SEQ ID NO: 186822 - DNA, 15 bp, Homo sapiens
tacactaagaagctc

SEQ ID NO: 186823 - DNA, 15 bp, Homo sapiens
acactaagaagctca

SEQ ID NO: 186824 - DNA, 15 bp, Homo sapiens
cactaagaagctcaa

SEQ ID NO: 186825 - DNA, 15 bp, Homo sapiens
actaagaagctcaac

SEQ ID NO: 186826 - DNA, 15 bp, Homo sapiens
ctaagaagctcaaca

SEQ ID NO: 186827 - DNA, 15 bp, Homo sapiens
taagaagctcaacac

SEQ ID NO: 186828 - DNA, 15 bp, Homo sapiens
aagaagctcaacacc

SEQ ID NO: 186829 - DNA, 15 bp, Homo sapiens
agaagctcaacaccc

SEQ ID NO: 186830 - DNA, 15 bp, Homo sapiens
gaagctcaacaccca

SEQ ID NO: 186831 - DNA, 15 bp, Homo sapiens
aagctcaacacccag

SEQ ID NO: 186832 - DNA, 15 bp, Homo sapiens
agctcaacacccagt

SEQ ID NO: 186833 - DNA, 15 bp, Homo sapiens
gctcaacacccagtg

SEQ ID NO: 186834 - DNA, 15 bp, Homo sapiens
ctcaacacccagtga

SEQ ID NO: 186835 - DNA, 15 bp, Homo sapiens
tcaacacccagtgag

SEQ ID NO: 186836 - DNA, 15 bp, Homo sapiens
caacacccagtgagg

SEQ ID NO: 186837 - DNA, 15 bp, Homo sapiens
aacacccagtgaggc

SEQ ID NO: 186838 - DNA, 15 bp, Homo sapiens
acacccagtgaggcg

SEQ ID NO: 186839 - DNA, 15 bp, Homo sapiens
cacccagtgaggcgc

SEQ ID NO: 186840 - DNA, 15 bp, Homo sapiens
acccagtgaggcgcc

SEQ ID NO: 186841 - DNA, 15 bp, Homo sapiens
cccagtgaggcgccc

SEQ ID NO: 186842 - DNA, 15 bp, Homo sapiens
ccagtgaggcgcccg

SEQ ID NO: 186843 - DNA, 15 bp, Homo sapiens
cagtgaggcgcccgc

SEQ ID NO: 186844 - DNA, 15 bp, Homo sapiens
agtgaggcgcccgcc

SEQ ID NO: 186845 - DNA, 15 bp, Homo sapiens
gtgaggcgcccgccg

SEQ ID NO: 186846 - DNA, 15 bp, Homo sapiens
tgaggcgcccgccgc

SEQ ID NO: 186847 - DNA, 15 bp, Homo sapiens
gaggcgcccgccgcc

SEQ ID NO: 186848 - DNA, 15 bp, Homo sapiens
aggcgcccgccgccg

SEQ ID NO: 186849 - DNA, 15 bp, Homo sapiens
ggcgcccgccgccgc

SEQ ID NO: 186850 - DNA, 15 bp, Homo sapiens
gcgcccgccgccgcc

SEQ ID NO: 186851 - DNA, 15 bp, Homo sapiens
cgcccgccgccgccc

SEQ ID NO: 186852 - DNA, 15 bp, Homo sapiens
gcccgccgccgcccc

SEQ ID NO: 186853 - DNA, 15 bp, Homo sapiens
cccgccgccgccccc

SEQ ID NO: 186854 - DNA, 15 bp, Homo sapiens
ccgccgccgcccccc

SEQ ID NO: 186855 - DNA, 15 bp, Homo sapiens
cgccgccgcccccct

SEQ ID NO: 186856 - DNA, 15 bp, Homo sapiens
gccgccgcccccctt

SEQ ID NO: 186857 - DNA, 15 bp, Homo sapiens
ccgccgccccccttc

SEQ ID NO: 186858 - DNA, 15 bp, Homo sapiens
cgccgccccccttcc

SEQ ID NO: 186859 - DNA, 15 bp, Homo sapiens
gccgccccccttccc

SEQ ID NO: 186860 - DNA, 15 bp, Homo sapiens
ccgccccccttcccg

SEQ ID NO: 186861 - DNA, 15 bp, Homo sapiens
cgccccccttcccgg

SEQ ID NO: 186862 - DNA, 15 bp, Homo sapiens
gccccccttcccggt

SEQ ID NO: 186863 - DNA, 15 bp, Homo sapiens
ccccccttcccggtg

SEQ ID NO: 186864 - DNA, 15 bp, Homo sapiens
cccccttcccggtgc

SEQ ID NO: 186865 - DNA, 15 bp, Homo sapiens
ccccttcccggtgct

SEQ ID NO: 186866 - DNA, 15 bp, Homo sapiens
cccttcccggtgctc

SEQ ID NO: 186867 - DNA, 15 bp, Homo sapiens
ccttcccggtgctca

SEQ ID NO: 186868 - DNA, 15 bp, Homo sapiens
cttcccggtgctcag

SEQ ID NO: 186869 - DNA, 15 bp, Homo sapiens
ttcccggtgctcaga

SEQ ID NO: 186870 - DNA, 15 bp, Homo sapiens
tcccggtgctcagaa

SEQ ID NO: 186871 - DNA, 15 bp, Homo sapiens
cccggtgctcagaat

SEQ ID NO: 186872 - DNA, 15 bp, Homo sapiens
ccggtgctcagaata

SEQ ID NO: 186873 - DNA, 15 bp, Homo sapiens
cggtgctcagaataa

SEQ ID NO: 186874 - DNA, 15 bp, Homo sapiens
ggtgctcagaataaa

SEQ ID NO: 186875 - DNA, 15 bp, Homo sapiens
gtgctcagaataaac

SEQ ID NO: 186876 - DNA, 15 bp, Homo sapiens
tgctcagaataaacg

SEQ ID NO: 186877 - DNA, 15 bp, Homo sapiens
gctcagaataaacgt

SEQ ID NO: 186878 - DNA, 15 bp, Homo sapiens
ctcagaataaacgtt

SEQ ID NO: 186879 - DNA, 15 bp, Homo sapiens
tcagaataaacgttt

SEQ ID NO: 186880 - DNA, 15 bp, Homo sapiens
cagaataaacgtttc

SEQ ID NO: 186881 - DNA, 15 bp, Homo sapiens
agaataaacgtttcc

SEQ ID NO: 186882 - DNA, 15 bp, Homo sapiens
gaataaacgtttcca

SEQ ID NO: 186883 - DNA, 15 bp, Homo sapiens
aataaacgtttccaa

SEQ ID NO: 186884 - DNA, 15 bp, Homo sapiens
ataaacgtttccaaa

SEQ ID NO: 186885 - DNA, 15 bp, Homo sapiens
taaacgtttccaaag

SEQ ID NO: 186886 - DNA, 15 bp, Homo sapiens
aaacgtttccaaagt

SEQ ID NO: 186887 - DNA, 15 bp, Homo sapiens
aacgtttccaaagtg

SEQ ID NO: 186888 - DNA, 15 bp, Homo sapiens
acgtttccaaagtgg

SEQ ID NO: 186889 - DNA, 15 bp, Homo sapiens
cgtttccaaagtggg

SEQ ID NO: 186890 - DNA, 15 bp, Homo sapiens
gtttccaaagtggga

SEQ ID NO: 186891 - DNA, 15 bp, Homo sapiens
tttccaaagtgggaa

SEQ ID NO: 186892 - DNA, 15 bp, Homo sapiens
ttccaaagtgggaag

SEQ ID NO: 186893 - DNA, 15 bp, Homo sapiens
tccaaagtgggaagc

SEQ ID NO: 186894 - DNA, 15 bp, Homo sapiens
ccaaagtgggaagca

SEQ ID NO: 186895 - DNA, 15 bp, Homo sapiens
caaagtgggaagcag

SEQ ID NO: 186896 - DNA, 15 bp, Homo sapiens
aaagtgggaagcagc

SEQ ID NO: 186897 - DNA, 15 bp, Homo sapiens
aagtgggaagcagct

SEQ ID NO: 186898 - DNA, 15 bp, Homo sapiens
agtgggaagcagctt

SEQ ID NO: 186899 - DNA, 15 bp, Homo sapiens
gtgggaagcagcttc

SEQ ID NO: 186900 - DNA, 15 bp, Homo sapiens
tgggaagcagcttct

SEQ ID NO: 186901 - DNA, 15 bp, Homo sapiens
gggaagcagcttctt

SEQ ID NO: 186902 - DNA, 15 bp, Homo sapiens
ggaagcagcttcttt

SEQ ID NO: 186903 - DNA, 15 bp, Homo sapiens
gaagcagcttctttc

SEQ ID NO: 186904 - DNA, 15 bp, Homo sapiens
aagcagcttctttct

SEQ ID NO: 186905 - DNA, 15 bp, Homo sapiens
agcagcttctttctt

SEQ ID NO: 186906 - DNA, 15 bp, Homo sapiens
gcagcttctttcttt

SEQ ID NO: 186907 - DNA, 15 bp, Homo sapiens
cagcttctttctttt

SEQ ID NO: 186908 - DNA, 15 bp, Homo sapiens
agcttctttcttttg

SEQ ID NO: 186909 - DNA, 15 bp, Homo sapiens
gcttctttcttttgg

SEQ ID NO: 186910 - DNA, 15 bp, Homo sapiens
cttctttcttttggg

SEQ ID NO: 186911 - DNA, 15 bp, Homo sapiens
ttctttcttttggga

SEQ ID NO: 186912 - DNA, 15 bp, Homo sapiens
tctttcttttgggag

SEQ ID NO: 186913 - DNA, 15 bp, Homo sapiens
ctttcttttgggaga

SEQ ID NO: 186914 - DNA, 15 bp, Homo sapiens
tttcttttgggagaa

SEQ ID NO: 186915 - DNA, 15 bp, Homo sapiens
ttcttttgggagaat

SEQ ID NO: 186916 - DNA, 15 bp, Homo sapiens
tcttttgggagaata

SEQ ID NO: 186917 - DNA, 15 bp, Homo sapiens
cttttgggagaatag

SEQ ID NO: 186918 - DNA, 15 bp, Homo sapiens
ttttgggagaataga

SEQ ID NO: 186919 - DNA, 15 bp, Homo sapiens
tttgggagaatagag

SEQ ID NO: 186920 - DNA, 15 bp, Homo sapiens
ttgggagaatagagg

SEQ ID NO: 186921 - DNA, 15 bp, Homo sapiens
tgggagaatagaggg

SEQ ID NO: 186922 - DNA, 15 bp, Homo sapiens
gggagaatagagggg

SEQ ID NO: 186923 - DNA, 15 bp, Homo sapiens
ggagaatagaggggg

SEQ ID NO: 186924 - DNA, 15 bp, Homo sapiens
gagaatagagggggg

SEQ ID NO: 186925 - DNA, 15 bp, Homo sapiens
agaatagaggggggt

SEQ ID NO: 186926 - DNA, 15 bp, Homo sapiens
gaatagaggggggtg

SEQ ID NO: 186927 - DNA, 15 bp, Homo sapiens
aatagaggggggtgc

SEQ ID NO: 186928 - DNA, 15 bp, Homo sapiens
atagaggggggtgcg

SEQ ID NO: 186929 - DNA, 15 bp, Homo sapiens
tagaggggggtgcgg

SEQ ID NO: 186930 - DNA, 15 bp, Homo sapiens
agaggggggtgcggg

SEQ ID NO: 186931 - DNA, 15 bp, Homo sapiens
gaggggggtgcgggg

SEQ ID NO: 186932 - DNA, 15 bp, Homo sapiens
aggggggtgcgggga

SEQ ID NO: 186933 - DNA, 15 bp, Homo sapiens
ggggggtgcggggac

SEQ ID NO: 186934 - DNA, 15 bp, Homo sapiens
gggggtgcggggaca

SEQ ID NO: 186935 - DNA, 15 bp, Homo sapiens
ggggtgcggggacat

SEQ ID NO: 186936 - DNA, 15 bp, Homo sapiens
gggtgcggggacatc

SEQ ID NO: 186937 - DNA, 15 bp, Homo sapiens
ggtgcggggacatcc

SEQ ID NO: 186938 - DNA, 15 bp, Homo sapiens
gtgcggggacatccg

SEQ ID NO: 186939 - DNA, 15 bp, Homo sapiens
tgcggggacatccgg

SEQ ID NO: 186940 - DNA, 15 bp, Homo sapiens
gcggggacatccggg

SEQ ID NO: 186941 - DNA, 15 bp, Homo sapiens
cggggacatccgggg

SEQ ID NO: 186942 - DNA, 15 bp, Homo sapiens
ggggacatccggggg

SEQ ID NO: 186943 - DNA, 15 bp, Homo sapiens
gggacatccggggga

SEQ ID NO: 186944 - DNA, 15 bp, Homo sapiens
ggacatccgggggag

SEQ ID NO: 186945 - DNA, 15 bp, Homo sapiens
gacatccgggggagc

SEQ ID NO: 186946 - DNA, 15 bp, Homo sapiens
acatccgggggagcc

SEQ ID NO: 186947 - DNA, 15 bp, Homo sapiens
catccgggggagccc

SEQ ID NO: 186948 - DNA, 15 bp, Homo sapiens
atccgggggagcccg

SEQ ID NO: 186949 - DNA, 15 bp, Homo sapiens
tccgggggagcccgg

SEQ ID NO: 186950 - DNA, 15 bp, Homo sapiens
ccgggggagcccggg

SEQ ID NO: 186951 - DNA, 15 bp, Homo sapiens
cgggggagcccgggt

SEQ ID NO: 186952 - DNA, 15 bp, Homo sapiens
gggggagcccgggtg

SEQ ID NO: 186953 - DNA, 15 bp, Homo sapiens
ggggagcccgggtgg

SEQ ID NO: 186954 - DNA, 15 bp, Homo sapiens
gggagcccgggtggg

SEQ ID NO: 186955 - DNA, 15 bp, Homo sapiens
ggagcccgggtgggg

SEQ ID NO: 186956 - DNA, 15 bp, Homo sapiens
gagcccgggtggggc

SEQ ID NO: 186957 - DNA, 15 bp, Homo sapiens
agcccgggtggggcc

SEQ ID NO: 186958 - DNA, 15 bp, Homo sapiens
gcccgggtggggcct

SEQ ID NO: 186959 - DNA, 15 bp, Homo sapiens
cccgggtggggcctt

SEQ ID NO: 186960 - DNA, 15 bp, Homo sapiens
ccgggtggggccttt

SEQ ID NO: 186961 - DNA, 15 bp, Homo sapiens
cgggtggggcctttg

SEQ ID NO: 186962 - DNA, 15 bp, Homo sapiens
gggtggggcctttgg

SEQ ID NO: 186963 - DNA, 15 bp, Homo sapiens
ggtggggcctttggc

SEQ ID NO: 186964 - DNA, 15 bp, Homo sapiens
gtggggcctttggcc

SEQ ID NO: 186965 - DNA, 15 bp, Homo sapiens
tggggcctttggccc

SEQ ID NO: 186966 - DNA, 15 bp, Homo sapiens
ggggcctttggccct

SEQ ID NO: 186967 - DNA, 15 bp, Homo sapiens
gggcctttggccctg

SEQ ID NO: 186968 - DNA, 15 bp, Homo sapiens
ggcctttggccctgg

SEQ ID NO: 186969 - DNA, 15 bp, Homo sapiens
gcctttggccctgga

SEQ ID NO: 186970 - DNA, 15 bp, Homo sapiens
cctttggccctggag

SEQ ID NO: 186971 - DNA, 15 bp, Homo sapiens
ctttggccctggagc

SEQ ID NO: 186972 - DNA, 15 bp, Homo sapiens
tttggccctggagca

SEQ ID NO: 186973 - DNA, 15 bp, Homo sapiens
ttggccctggagcag

SEQ ID NO: 186974 - DNA, 15 bp, Homo sapiens
tggccctggagcagg

SEQ ID NO: 186975 - DNA, 15 bp, Homo sapiens
ggccctggagcaggg

SEQ ID NO: 186976 - DNA, 15 bp, Homo sapiens
gccctggagcaggga

SEQ ID NO: 186977 - DNA, 15 bp, Homo sapiens
ccctggagcagggac

SEQ ID NO: 186978 - DNA, 15 bp, Homo sapiens
cctggagcagggact

SEQ ID NO: 186979 - DNA, 15 bp, Homo sapiens
ctggagcagggactt

SEQ ID NO: 186980 - DNA, 15 bp, Homo sapiens
tggagcagggacttc

SEQ ID NO: 186981 - DNA, 15 bp, Homo sapiens
ggagcagggacttcc

SEQ ID NO: 186982 - DNA, 15 bp, Homo sapiens
gagcagggacttcct

SEQ ID NO: 186983 - DNA, 15 bp, Homo sapiens
agcagggacttcctg

SEQ ID NO: 186984 - DNA, 15 bp, Homo sapiens
gcagggacttcctgc

SEQ ID NO: 186985 - DNA, 15 bp, Homo sapiens
cagggacttcctgcc

SEQ ID NO: 186986 - DNA, 15 bp, Homo sapiens
agggacttcctgccg

SEQ ID NO: 186987 - DNA, 15 bp, Homo sapiens
gggacttcctgccgg

SEQ ID NO: 186988 - DNA, 15 bp, Homo sapiens
ggacttcctgccgga

SEQ ID NO: 186989 - DNA, 15 bp, Homo sapiens
gacttcctgccggat

SEQ ID NO: 186990 - DNA, 15 bp, Homo sapiens
acttcctgccggatc

SEQ ID NO: 186991 - DNA, 15 bp, Homo sapiens
cttcctgccggatct

SEQ ID NO: 186992 - DNA, 15 bp, Homo sapiens
ttcctgccggatctc

SEQ ID NO: 186993 - DNA, 15 bp, Homo sapiens
tcctgccggatctca

SEQ ID NO: 186994 - DNA, 15 bp, Homo sapiens
cctgccggatctcaa

SEQ ID NO: 186995 - DNA, 15 bp, Homo sapiens
ctgccggatctcaac

SEQ ID NO: 186996 - DNA, 15 bp, Homo sapiens
tgccggatctcaaca

SEQ ID NO: 186997 - DNA, 15 bp, Homo sapiens
gccggatctcaacaa

SEQ ID NO: 186998 - DNA, 15 bp, Homo sapiens
ccggatctcaacaac

SEQ ID NO: 186999 - DNA, 15 bp, Homo sapiens
cggatctcaacaact

SEQ ID NO: 187000 - DNA, 15 bp, Homo sapiens
ggatctcaacaactc

SEQ ID NO: 187001 - DNA, 15 bp, Homo sapiens
gatctcaacaactcc

SEQ ID NO: 187002 - DNA, 15 bp, Homo sapiens
atctcaacaactccg

SEQ ID NO: 187003 - DNA, 15 bp, Homo sapiens
tctcaacaactccgt

SEQ ID NO: 187004 - DNA, 15 bp, Homo sapiens
ctcaacaactccgtg

SEQ ID NO: 187005 - DNA, 15 bp, Homo sapiens
tcaacaactccgtgc

SEQ ID NO: 187006 - DNA, 15 bp, Homo sapiens
caacaactccgtgcc

SEQ ID NO: 187007 - DNA, 15 bp, Homo sapiens
aacaactccgtgccc

SEQ ID NO: 187008 - DNA, 15 bp, Homo sapiens
acaactccgtgccca

SEQ ID NO: 187009 - DNA, 15 bp, Homo sapiens
caactccgtgcccag

SEQ ID NO: 187010 - DNA, 15 bp, Homo sapiens
aactccgtgcccaga

SEQ ID NO: 187011 - DNA, 15 bp, Homo sapiens
actccgtgcccagac

SEQ ID NO: 187012 - DNA, 15 bp, Homo sapiens
ctccgtgcccagact

SEQ ID NO: 187013 - DNA, 15 bp, Homo sapiens
tccgtgcccagactg

SEQ ID NO: 187014 - DNA, 15 bp, Homo sapiens
ccgtgcccagactgg

SEQ ID NO: 187015 - DNA, 15 bp, Homo sapiens
cgtgcccagactgga

SEQ ID NO: 187016 - DNA, 15 bp, Homo sapiens
gtgcccagactggac

SEQ ID NO: 187017 - DNA, 15 bp, Homo sapiens
tgcccagactggacg

SEQ ID NO: 187018 - DNA, 15 bp, Homo sapiens
gcccagactggacgt

SEQ ID NO: 187019 - DNA, 15 bp, Homo sapiens
cccagactggacgtc

SEQ ID NO: 187020 - DNA, 15 bp, Homo sapiens
ccagactggacgtct

SEQ ID NO: 187021 - DNA, 15 bp, Homo sapiens
cagactggacgtctt

SEQ ID NO: 187022 - DNA, 15 bp, Homo sapiens
agactggacgtctta

SEQ ID NO: 187023 - DNA, 15 bp, Homo sapiens
gactggacgtcttag

SEQ ID NO: 187024 - DNA, 15 bp, Homo sapiens
actggacgtcttagg

SEQ ID NO: 187025 - DNA, 15 bp, Homo sapiens
ctggacgtcttaggg

SEQ ID NO: 187026 - DNA, 15 bp, Homo sapiens
tggacgtcttagggc

SEQ ID NO: 187027 - DNA, 15 bp, Homo sapiens
ggacgtcttagggcc

SEQ ID NO: 187028 - DNA, 15 bp, Homo sapiens
gacgtcttagggcca

SEQ ID NO: 187029 - DNA, 15 bp, Homo sapiens
acgtcttagggccaa

SEQ ID NO: 187030 - DNA, 15 bp, Homo sapiens
cgtcttagggccaag

SEQ ID NO: 187031 - DNA, 15 bp, Homo sapiens
gtcttagggccaaga

SEQ ID NO: 187032 - DNA, 15 bp, Homo sapiens
tcttagggccaagat

SEQ ID NO: 187033 - DNA, 15 bp, Homo sapiens
cttagggccaagatc

SEQ ID NO: 187034 - DNA, 15 bp, Homo sapiens
ttagggccaagatcg

SEQ ID NO: 187035 - DNA, 15 bp, Homo sapiens
tagggccaagatcga

SEQ ID NO: 187036 - DNA, 15 bp, Homo sapiens
agggccaagatcgac

SEQ ID NO: 187037 - DNA, 15 bp, Homo sapiens
gggccaagatcgacg

SEQ ID NO: 187038 - DNA, 15 bp, Homo sapiens
ggccaagatcgacgt

SEQ ID NO: 187039 - DNA, 15 bp, Homo sapiens
gccaagatcgacgtt

SEQ ID NO: 187040 - DNA, 15 bp, Homo sapiens
ccaagatcgacgttg

SEQ ID NO: 187041 - DNA, 15 bp, Homo sapiens
caagatcgacgttgg

SEQ ID NO: 187042 - DNA, 15 bp, Homo sapiens
aagatcgacgttgga

SEQ ID NO: 187043 - DNA, 15 bp, Homo sapiens
agatcgacgttggag

SEQ ID NO: 187044 - DNA, 15 bp, Homo sapiens
gatcgacgttggagg

SEQ ID NO: 187045 - DNA, 15 bp, Homo sapiens
atcgacgttggagga

SEQ ID NO: 187046 - DNA, 15 bp, Homo sapiens
tcgacgttggaggac

SEQ ID NO: 187047 - DNA, 15 bp, Homo sapiens
cgacgttggaggacc

SEQ ID NO: 187048 - DNA, 15 bp, Homo sapiens
gacgttggaggacct

SEQ ID NO: 187049 - DNA, 15 bp, Homo sapiens
acgttggaggacctg

SEQ ID NO: 187050 - DNA, 15 bp, Homo sapiens
cgttggaggacctgc

SEQ ID NO: 187051 - DNA, 15 bp, Homo sapiens
gttggaggacctgct

SEQ ID NO: 187052 - DNA, 15 bp, Homo sapiens
ttggaggacctgctg

SEQ ID NO: 187053 - DNA, 15 bp, Homo sapiens
ggaggacctgctgga

SEQ ID NO: 187054 - DNA, 15 bp, Homo sapiens
gaggacctgctggac

SEQ ID NO: 187055 - DNA, 15 bp, Homo sapiens
aggacctgctggacg

SEQ ID NO: 187056 - DNA, 15 bp, Homo sapiens
ggacctgctggacgc

SEQ ID NO: 187057 - DNA, 15 bp, Homo sapiens
gacctgctggacgcc

SEQ ID NO: 187058 - DNA, 15 bp, Homo sapiens
acctgctggacgcct

SEQ ID NO: 187059 - DNA, 15 bp, Homo sapiens
cctgctggacgcctg

SEQ ID NO: 187060 - DNA, 15 bp, Homo sapiens
ctgctggacgcctgg

SEQ ID NO: 187061 - DNA, 15 bp, Homo sapiens
tgctggacgcctggc

SEQ ID NO: 187062 - DNA, 15 bp, Homo sapiens
gctggacgcctggct

SEQ ID NO: 187063 - DNA, 15 bp, Homo sapiens
ctggacgcctggctg

SEQ ID NO: 187064 - DNA, 15 bp, Homo sapiens
tggacgcctggctgc

SEQ ID NO: 187065 - DNA, 15 bp, Homo sapiens
ggacgcctggctgct

SEQ ID NO: 187066 - DNA, 15 bp, Homo sapiens
gacgcctggctgctt

SEQ ID NO: 187067 - DNA, 15 bp, Homo sapiens
acgcctggctgctta

SEQ ID NO: 187068 - DNA, 15 bp, Homo sapiens
cgcctggctgcttac

SEQ ID NO: 187069 - DNA, 15 bp, Homo sapiens
gcctggctgcttacg

SEQ ID NO: 187070 - DNA, 15 bp, Homo sapiens
cctggctgcttacga

SEQ ID NO: 187071 - DNA, 15 bp, Homo sapiens
ctggctgcttacgag

SEQ ID NO: 187072 - DNA, 15 bp, Homo sapiens
tggctgcttacgagt

SEQ ID NO: 187073 - DNA, 15 bp, Homo sapiens
ggctgcttacgagtg

SEQ ID NO: 187074 - DNA, 15 bp, Homo sapiens
gctgcttacgagtga

SEQ ID NO: 187075 - DNA, 15 bp, Homo sapiens
ctgcttacgagtgag

SEQ ID NO: 187076 - DNA, 15 bp, Homo sapiens
tgcttacgagtgagg

SEQ ID NO: 187077 - DNA, 15 bp, Homo sapiens
gcttacgagtgaggg

SEQ ID NO: 187078 - DNA, 15 bp, Homo sapiens
cttacgagtgaggga

SEQ ID NO: 187079 - DNA, 15 bp, Homo sapiens
ttacgagtgagggag

SEQ ID NO: 187080 - DNA, 15 bp, Homo sapiens
tacgagtgagggagt

SEQ ID NO: 187081 - DNA, 15 bp, Homo sapiens
acgagtgagggagta

SEQ ID NO: 187082 - DNA, 15 bp, Homo sapiens
cgagtgagggagtag

SEQ ID NO: 187083 - DNA, 15 bp, Homo sapiens
gagtgagggagtaga

SEQ ID NO: 187084 - DNA, 15 bp, Homo sapiens
agtgagggagtagag

SEQ ID NO: 187085 - DNA, 15 bp, Homo sapiens
gtgagggagtagagt

SEQ ID NO: 187086 - DNA, 15 bp, Homo sapiens
tgagggagtagagtc

SEQ ID NO: 187087 - DNA, 15 bp, Homo sapiens
gagggagtagagtct

SEQ ID NO: 187088 - DNA, 15 bp, Homo sapiens
agggagtagagtctg

SEQ ID NO: 187089 - DNA, 15 bp, Homo sapiens
gggagtagagtctgc

SEQ ID NO: 187090 - DNA, 15 bp, Homo sapiens
ggagtagagtctgcc

SEQ ID NO: 187091 - DNA, 15 bp, Homo sapiens
gagtagagtctgcct

SEQ ID NO: 187092 - DNA, 15 bp, Homo sapiens
agtagagtctgcctt

SEQ ID NO: 187093 - DNA, 15 bp, Homo sapiens
gtagagtctgcctta

SEQ ID NO: 187094 - DNA, 15 bp, Homo sapiens
tagagtctgccttag

SEQ ID NO: 187095 - DNA, 15 bp, Homo sapiens
agagtctgccttagc

SEQ ID NO: 187096 - DNA, 15 bp, Homo sapiens
gagtctgccttagca

SEQ ID NO: 187097 - DNA, 15 bp, Homo sapiens
agtctgccttagcaa

SEQ ID NO: 187098 - DNA, 15 bp, Homo sapiens
gtctgccttagcaag

SEQ ID NO: 187099 - DNA, 15 bp, Homo sapiens
tctgccttagcaagg

SEQ ID NO: 187100 - DNA, 15 bp, Homo sapiens
ctgccttagcaaggc

SEQ ID NO: 187101 - DNA, 15 bp, Homo sapiens
tgccttagcaaggct

SEQ ID NO: 187102 - DNA, 15 bp, Homo sapiens
gccttagcaaggctc

SEQ ID NO: 187103 - DNA, 15 bp, Homo sapiens
ccttagcaaggctca

SEQ ID NO: 187104 - DNA, 15 bp, Homo sapiens
cttagcaaggctcaa

SEQ ID NO: 187105 - DNA, 15 bp, Homo sapiens
ttagcaaggctcaag

SEQ ID NO: 187106 - DNA, 15 bp, Homo sapiens
tagcaaggctcaagt

SEQ ID NO: 187107 - DNA, 15 bp, Homo sapiens
agcaaggctcaagta

SEQ ID NO: 187108 - DNA, 15 bp, Homo sapiens
gcaaggctcaagtag

SEQ ID NO: 187109 - DNA, 15 bp, Homo sapiens
caaggctcaagtaga

SEQ ID NO: 187110 - DNA, 15 bp, Homo sapiens
aaggctcaagtagaa

SEQ ID NO: 187111 - DNA, 15 bp, Homo sapiens
aggctcaagtagaaa

SEQ ID NO: 187112 - DNA, 15 bp, Homo sapiens
ggctcaagtagaaag

SEQ ID NO: 187113 - DNA, 15 bp, Homo sapiens
gctcaagtagaaagg

SEQ ID NO: 187114 - DNA, 15 bp, Homo sapiens
ctcaagtagaaagga

SEQ ID NO: 187115 - DNA, 15 bp, Homo sapiens
tcaagtagaaaggaa

SEQ ID NO: 187116 - DNA, 15 bp, Homo sapiens
caagtagaaaggaag

SEQ ID NO: 187117 - DNA, 15 bp, Homo sapiens
aagtagaaaggaagt

SEQ ID NO: 187118 - DNA, 15 bp, Homo sapiens
agtagaaaggaagtc

SEQ ID NO: 187119 - DNA, 15 bp, Homo sapiens
gtagaaaggaagtca

SEQ ID NO: 187120 - DNA, 15 bp, Homo sapiens
tagaaaggaagtcac

SEQ ID NO: 187121 - DNA, 15 bp, Homo sapiens
agaaaggaagtcaca

SEQ ID NO: 187122 - DNA, 15 bp, Homo sapiens
gaaaggaagtcacag

SEQ ID NO: 187123 - DNA, 15 bp, Homo sapiens
aaaggaagtcacagc

SEQ ID NO: 187124 - DNA, 15 bp, Homo sapiens
aaggaagtcacagcg

SEQ ID NO: 187125 - DNA, 15 bp, Homo sapiens
aggaagtcacagcgg

SEQ ID NO: 187126 - DNA, 15 bp, Homo sapiens
ggaagtcacagcgga

SEQ ID NO: 187127 - DNA, 15 bp, Homo sapiens
gaagtcacagcggac

SEQ ID NO: 187128 - DNA, 15 bp, Homo sapiens
aagtcacagcggacc

SEQ ID NO: 187129 - DNA, 15 bp, Homo sapiens
agtcacagcggacca

SEQ ID NO: 187130 - DNA, 15 bp, Homo sapiens
gtcacagcggaccag

SEQ ID NO: 187131 - DNA, 15 bp, Homo sapiens
tcacagcggaccagg

SEQ ID NO: 187132 - DNA, 15 bp, Homo sapiens
cacagcggaccaggc

SEQ ID NO: 187133 - DNA, 15 bp, Homo sapiens
acagcggaccaggca

SEQ ID NO: 187134 - DNA, 15 bp, Homo sapiens
cagcggaccaggcaa

SEQ ID NO: 187135 - DNA, 15 bp, Homo sapiens
agcggaccaggcaaa

SEQ ID NO: 187136 - DNA, 15 bp, Homo sapiens
gcggaccaggcaaag

SEQ ID NO: 187137 - DNA, 15 bp, Homo sapiens
cggaccaggcaaagc

SEQ ID NO: 187138 - DNA, 15 bp, Homo sapiens
ggaccaggcaaagcc

SEQ ID NO: 187139 - DNA, 15 bp, Homo sapiens
gaccaggcaaagcca

SEQ ID NO: 187140 - DNA, 15 bp, Homo sapiens
accaggcaaagccac

SEQ ID NO: 187141 - DNA, 15 bp, Homo sapiens
ccaggcaaagccaca

SEQ ID NO: 187142 - DNA, 15 bp, Homo sapiens
caggcaaagccacag

SEQ ID NO: 187143 - DNA, 15 bp, Homo sapiens
aggcaaagccacaga

SEQ ID NO: 187144 - DNA, 15 bp, Homo sapiens
ggcaaagccacagac

SEQ ID NO: 187145 - DNA, 15 bp, Homo sapiens
gcaaagccacagaca

SEQ ID NO: 187146 - DNA, 15 bp, Homo sapiens
caaagccacagacaa

SEQ ID NO: 187147 - DNA, 15 bp, Homo sapiens
aaagccacagacaat

SEQ ID NO: 187148 - DNA, 15 bp, Homo sapiens
aagccacagacaatc

SEQ ID NO: 187149 - DNA, 15 bp, Homo sapiens
agccacagacaatcc

SEQ ID NO: 187150 - DNA, 15 bp, Homo sapiens
gccacagacaatcca

SEQ ID NO: 187151 - DNA, 15 bp, Homo sapiens
ccacagacaatccaa

SEQ ID NO: 187152 - DNA, 15 bp, Homo sapiens
cacagacaatccaag

SEQ ID NO: 187153 - DNA, 15 bp, Homo sapiens
acagacaatccaagg

SEQ ID NO: 187154 - DNA, 15 bp, Homo sapiens
cagacaatccaaggc

SEQ ID NO: 187155 - DNA, 15 bp, Homo sapiens
agacaatccaaggcc

SEQ ID NO: 187156 - DNA, 15 bp, Homo sapiens
gacaatccaaggcca

SEQ ID NO: 187157 - DNA, 15 bp, Homo sapiens
acaatccaaggccag

SEQ ID NO: 187158 - DNA, 15 bp, Homo sapiens
caatccaaggccagg

SEQ ID NO: 187159 - DNA, 15 bp, Homo sapiens
aatccaaggccaggt

SEQ ID NO: 187160 - DNA, 15 bp, Homo sapiens
atccaaggccaggtg

SEQ ID NO: 187161 - DNA, 15 bp, Homo sapiens
tccaaggccaggtgc

SEQ ID NO: 187162 - DNA, 15 bp, Homo sapiens
ccaaggccaggtgcc

SEQ ID NO: 187163 - DNA, 15 bp, Homo sapiens
caaggccaggtgccc

SEQ ID NO: 187164 - DNA, 15 bp, Homo sapiens
aaggccaggtgccct

SEQ ID NO: 187165 - DNA, 15 bp, Homo sapiens
aggccaggtgccctg

SEQ ID NO: 187166 - DNA, 15 bp, Homo sapiens
ggccaggtgccctga

SEQ ID NO: 187167 - DNA, 15 bp, Homo sapiens
gccaggtgccctgaa

SEQ ID NO: 187168 - DNA, 15 bp, Homo sapiens
ccaggtgccctgaaa

SEQ ID NO: 187169 - DNA, 15 bp, Homo sapiens
caggtgccctgaaag

SEQ ID NO: 187170 - DNA, 15 bp, Homo sapiens
aggtgccctgaaagg

SEQ ID NO: 187171 - DNA, 15 bp, Homo sapiens
ggtgccctgaaaggg

SEQ ID NO: 187172 - DNA, 15 bp, Homo sapiens
gtgccctgaaagggg

SEQ ID NO: 187173 - DNA, 15 bp, Homo sapiens
tgccctgaaaggggc

SEQ ID NO: 187174 - DNA, 15 bp, Homo sapiens
gccctgaaaggggct

SEQ ID NO: 187175 - DNA, 15 bp, Homo sapiens
ccctgaaaggggctc

SEQ ID NO: 187176 - DNA, 15 bp, Homo sapiens
cctgaaaggggctca

SEQ ID NO: 187177 - DNA, 15 bp, Homo sapiens
ctgaaaggggctcaa

SEQ ID NO: 187178 - DNA, 15 bp, Homo sapiens
tgaaaggggctcaaa

SEQ ID NO: 187179 - DNA, 15 bp, Homo sapiens
gaaaggggctcaaac

SEQ ID NO: 187180 - DNA, 15 bp, Homo sapiens
aaaggggctcaaaca

SEQ ID NO: 187181 - DNA, 15 bp, Homo sapiens
aaggggctcaaacaa

SEQ ID NO: 187182 - DNA, 15 bp, Homo sapiens
aggggctcaaacaag

SEQ ID NO: 187183 - DNA, 15 bp, Homo sapiens
ggggctcaaacaagg

SEQ ID NO: 187184 - DNA, 15 bp, Homo sapiens
gggctcaaacaaggc

SEQ ID NO: 187185 - DNA, 15 bp, Homo sapiens
ggctcaaacaaggcc

SEQ ID NO: 187186 - DNA, 15 bp, Homo sapiens
gctcaaacaaggcct

SEQ ID NO: 187187 - DNA, 15 bp, Homo sapiens
ctcaaacaaggcctg

SEQ ID NO: 187188 - DNA, 15 bp, Homo sapiens
tcaaacaaggcctgc

SEQ ID NO: 187189 - DNA, 15 bp, Homo sapiens
caaacaaggcctgca

SEQ ID NO: 187190 - DNA, 15 bp, Homo sapiens
aaacaaggcctgcag

SEQ ID NO: 187191 - DNA, 15 bp, Homo sapiens
aacaaggcctgcagc

SEQ ID NO: 187192 - DNA, 15 bp, Homo sapiens
acaaggcctgcagcc

SEQ ID NO: 187193 - DNA, 15 bp, Homo sapiens
caaggcctgcagccc

SEQ ID NO: 187194 - DNA, 15 bp, Homo sapiens
aaggcctgcagccct

SEQ ID NO: 187195 - DNA, 15 bp, Homo sapiens
aggcctgcagccctg

SEQ ID NO: 187196 - DNA, 15 bp, Homo sapiens
ggcctgcagccctgt

SEQ ID NO: 187197 - DNA, 15 bp, Homo sapiens
gcctgcagccctgtc

SEQ ID NO: 187198 - DNA, 15 bp, Homo sapiens
cctgcagccctgtct

SEQ ID NO: 187199 - DNA, 15 bp, Homo sapiens
ctgcagccctgtctg

SEQ ID NO: 187200 - DNA, 15 bp, Homo sapiens
tgcagccctgtctga

SEQ ID NO: 187201 - DNA, 15 bp, Homo sapiens
gcagccctgtctgag

SEQ ID NO: 187202 - DNA, 15 bp, Homo sapiens
cagccctgtctgagg

SEQ ID NO: 187203 - DNA, 15 bp, Homo sapiens
agccctgtctgaggc

SEQ ID NO: 187204 - DNA, 15 bp, Homo sapiens
gccctgtctgaggcg

SEQ ID NO: 187205 - DNA, 15 bp, Homo sapiens
ccctgtctgaggcgg

SEQ ID NO: 187206 - DNA, 15 bp, Homo sapiens
cctgtctgaggcggg

SEQ ID NO: 187207 - DNA, 15 bp, Homo sapiens
ctgtctgaggcgggc

SEQ ID NO: 187208 - DNA, 15 bp, Homo sapiens
tgtctgaggcgggcc

SEQ ID NO: 187209 - DNA, 15 bp, Homo sapiens
gtctgaggcgggcca

SEQ ID NO: 187210 - DNA, 15 bp, Homo sapiens
tctgaggcgggccag

SEQ ID NO: 187211 - DNA, 15 bp, Homo sapiens
ctgaggcgggccagg

SEQ ID NO: 187212 - DNA, 15 bp, Homo sapiens
tgaggcgggccagga

SEQ ID NO: 187213 - DNA, 15 bp, Homo sapiens
gaggcgggccaggaa

SEQ ID NO: 187214 - DNA, 15 bp, Homo sapiens
aggcgggccaggaaa

SEQ ID NO: 187215 - DNA, 15 bp, Homo sapiens
ggcgggccaggaaac

SEQ ID NO: 187216 - DNA, 15 bp, Homo sapiens
gcgggccaggaaaca

SEQ ID NO: 187217 - DNA, 15 bp, Homo sapiens
cgggccaggaaacag

SEQ ID NO: 187218 - DNA, 15 bp, Homo sapiens
gggccaggaaacagg

SEQ ID NO: 187219 - DNA, 15 bp, Homo sapiens
ggccaggaaacaggg

SEQ ID NO: 187220 - DNA, 15 bp, Homo sapiens
gccaggaaacagggt

SEQ ID NO: 187221 - DNA, 15 bp, Homo sapiens
ccaggaaacagggtt

SEQ ID NO: 187222 - DNA, 15 bp, Homo sapiens
caggaaacagggttg

SEQ ID NO: 187223 - DNA, 15 bp, Homo sapiens
aggaaacagggttgc

SEQ ID NO: 187224 - DNA, 15 bp, Homo sapiens
ggaaacagggttgct

SEQ ID NO: 187225 - DNA, 15 bp, Homo sapiens
gaaacagggttgctt

SEQ ID NO: 187226 - DNA, 15 bp, Homo sapiens
aaacagggttgcttt

SEQ ID NO: 187227 - DNA, 15 bp, Homo sapiens
aacagggttgcttta

SEQ ID NO: 187228 - DNA, 15 bp, Homo sapiens
acagggttgctttag

SEQ ID NO: 187229 - DNA, 15 bp, Homo sapiens
cagggttgctttagc

SEQ ID NO: 187230 - DNA, 15 bp, Homo sapiens
agggttgctttagct

SEQ ID NO: 187231 - DNA, 15 bp, Homo sapiens
gggttgctttagctg

SEQ ID NO: 187232 - DNA, 15 bp, Homo sapiens
ggttgctttagctgg

SEQ ID NO: 187233 - DNA, 15 bp, Homo sapiens
gttgctttagctggg

SEQ ID NO: 187234 - DNA, 15 bp, Homo sapiens
ttgctttagctggga

SEQ ID NO: 187235 - DNA, 15 bp, Homo sapiens
tgctttagctgggag

SEQ ID NO: 187236 - DNA, 15 bp, Homo sapiens
gctttagctgggagc

SEQ ID NO: 187237 - DNA, 15 bp, Homo sapiens
ctttagctgggagca

SEQ ID NO: 187238 - DNA, 15 bp, Homo sapiens
tttagctgggagcag

SEQ ID NO: 187239 - DNA, 15 bp, Homo sapiens
ttagctgggagcagt

SEQ ID NO: 187240 - DNA, 15 bp, Homo sapiens
tagctgggagcagtg

SEQ ID NO: 187241 - DNA, 15 bp, Homo sapiens
agctgggagcagtgg

SEQ ID NO: 187242 - DNA, 15 bp, Homo sapiens
gctgggagcagtggg

SEQ ID NO: 187243 - DNA, 15 bp, Homo sapiens
ctgggagcagtgggt

SEQ ID NO: 187244 - DNA, 15 bp, Homo sapiens
tgggagcagtgggtt

SEQ ID NO: 187245 - DNA, 15 bp, Homo sapiens
gggagcagtgggttc

SEQ ID NO: 187246 - DNA, 15 bp, Homo sapiens
ggagcagtgggttcc

SEQ ID NO: 187247 - DNA, 15 bp, Homo sapiens
gagcagtgggttccc

SEQ ID NO: 187248 - DNA, 15 bp, Homo sapiens
agcagtgggttcccc

SEQ ID NO: 187249 - DNA, 15 bp, Homo sapiens
gcagtgggttccccg

SEQ ID NO: 187250 - DNA, 15 bp, Homo sapiens
cagtgggttccccgt

SEQ ID NO: 187251 - DNA, 15 bp, Homo sapiens
agtgggttccccgtc

SEQ ID NO: 187252 - DNA, 15 bp, Homo sapiens
gtgggttccccgtcc

SEQ ID NO: 187253 - DNA, 15 bp, Homo sapiens
tgggttccccgtccc

SEQ ID NO: 187254 - DNA, 15 bp, Homo sapiens
gggttccccgtcccc

SEQ ID NO: 187255 - DNA, 15 bp, Homo sapiens
ggttccccgtcccca

SEQ ID NO: 187256 - DNA, 15 bp, Homo sapiens
gttccccgtccccag

SEQ ID NO: 187257 - DNA, 15 bp, Homo sapiens
ttccccgtccccaga

SEQ ID NO: 187258 - DNA, 15 bp, Homo sapiens
tccccgtccccagag

SEQ ID NO: 187259 - DNA, 15 bp, Homo sapiens
ccccgtccccagagg

SEQ ID NO: 187260 - DNA, 15 bp, Homo sapiens
cccgtccccagaggt

SEQ ID NO: 187261 - DNA, 15 bp, Homo sapiens
ccgtccccagaggtg

SEQ ID NO: 187262 - DNA, 15 bp, Homo sapiens
cgtccccagaggtgt

SEQ ID NO: 187263 - DNA, 15 bp, Homo sapiens
gtccccagaggtgtg

SEQ ID NO: 187264 - DNA, 15 bp, Homo sapiens
tccccagaggtgtgt

SEQ ID NO: 187265 - DNA, 15 bp, Homo sapiens
ccccagaggtgtgtc

SEQ ID NO: 187266 - DNA, 15 bp, Homo sapiens
cccagaggtgtgtcc

SEQ ID NO: 187267 - DNA, 15 bp, Homo sapiens
ccagaggtgtgtccg

SEQ ID NO: 187268 - DNA, 15 bp, Homo sapiens
cagaggtgtgtccgt

SEQ ID NO: 187269 - DNA, 15 bp, Homo sapiens
agaggtgtgtccgta

SEQ ID NO: 187270 - DNA, 15 bp, Homo sapiens
gaggtgtgtccgtat

SEQ ID NO: 187271 - DNA, 15 bp, Homo sapiens
aggtgtgtccgtata

SEQ ID NO: 187272 - DNA, 15 bp, Homo sapiens
ggtgtgtccgtatag

SEQ ID NO: 187273 - DNA, 15 bp, Homo sapiens
gtgtgtccgtataga

SEQ ID NO: 187274 - DNA, 15 bp, Homo sapiens
tgtgtccgtatagag

SEQ ID NO: 187275 - DNA, 15 bp, Homo sapiens
gtgtccgtatagagc

SEQ ID NO: 187276 - DNA, 15 bp, Homo sapiens
tgtccgtatagagcc

SEQ ID NO: 187277 - DNA, 15 bp, Homo sapiens
gtccgtatagagcct

SEQ ID NO: 187278 - DNA, 15 bp, Homo sapiens
tccgtatagagcctt

SEQ ID NO: 187279 - DNA, 15 bp, Homo sapiens
ccgtatagagccttc

SEQ ID NO: 187280 - DNA, 15 bp, Homo sapiens
cgtatagagccttct

SEQ ID NO: 187281 - DNA, 15 bp, Homo sapiens
gtatagagccttctc

SEQ ID NO: 187282 - DNA, 15 bp, Homo sapiens
tatagagccttctcc

SEQ ID NO: 187283 - DNA, 15 bp, Homo sapiens
atagagccttctcca

SEQ ID NO: 187284 - DNA, 15 bp, Homo sapiens
tagagccttctccag

SEQ ID NO: 187285 - DNA, 15 bp, Homo sapiens
agagccttctccagc

SEQ ID NO: 187286 - DNA, 15 bp, Homo sapiens
gagccttctccagcc

SEQ ID NO: 187287 - DNA, 15 bp, Homo sapiens
agccttctccagccc

SEQ ID NO: 187288 - DNA, 15 bp, Homo sapiens
gccttctccagccca

SEQ ID NO: 187289 - DNA, 15 bp, Homo sapiens
ccttctccagcccag

SEQ ID NO: 187290 - DNA, 15 bp, Homo sapiens
cttctccagcccagc

SEQ ID NO: 187291 - DNA, 15 bp, Homo sapiens
ttctccagcccagcc

SEQ ID NO: 187292 - DNA, 15 bp, Homo sapiens
tctccagcccagccg

SEQ ID NO: 187293 - DNA, 15 bp, Homo sapiens
ctccagcccagccgc

SEQ ID NO: 187294 - DNA, 15 bp, Homo sapiens
tccagcccagccgct

SEQ ID NO: 187295 - DNA, 15 bp, Homo sapiens
ccagcccagccgctg

SEQ ID NO: 187296 - DNA, 15 bp, Homo sapiens
cagcccagccgctgt

SEQ ID NO: 187297 - DNA, 15 bp, Homo sapiens
agcccagccgctgtc

SEQ ID NO: 187298 - DNA, 15 bp, Homo sapiens
gcccagccgctgtca

SEQ ID NO: 187299 - DNA, 15 bp, Homo sapiens
cccagccgctgtcag

SEQ ID NO: 187300 - DNA, 15 bp, Homo sapiens
ccagccgctgtcagc

SEQ ID NO: 187301 - DNA, 15 bp, Homo sapiens
cagccgctgtcagcg

SEQ ID NO: 187302 - DNA, 15 bp, Homo sapiens
agccgctgtcagcgg

SEQ ID NO: 187303 - DNA, 15 bp, Homo sapiens
gccgctgtcagcggg

SEQ ID NO: 187304 - DNA, 15 bp, Homo sapiens
ccgctgtcagcgggg

SEQ ID NO: 187305 - DNA, 15 bp, Homo sapiens
cgctgtcagcggggc

SEQ ID NO: 187306 - DNA, 15 bp, Homo sapiens
gctgtcagcggggcg

SEQ ID NO: 187307 - DNA, 15 bp, Homo sapiens
ctgtcagcggggcgg

SEQ ID NO: 187308 - DNA, 15 bp, Homo sapiens
tgtcagcggggcggg

SEQ ID NO: 187309 - DNA, 15 bp, Homo sapiens
gtcagcggggcggga

SEQ ID NO: 187310 - DNA, 15 bp, Homo sapiens
tcagcggggcgggac

SEQ ID NO: 187311 - DNA, 15 bp, Homo sapiens
cagcggggcgggacg

SEQ ID NO: 187312 - DNA, 15 bp, Homo sapiens
agcggggcgggacgg

SEQ ID NO: 187313 - DNA, 15 bp, Homo sapiens
gcggggcgggacgga

SEQ ID NO: 187314 - DNA, 15 bp, Homo sapiens
cggggcgggacggag

SEQ ID NO: 187315 - DNA, 15 bp, Homo sapiens
ggggcgggacggagc

SEQ ID NO: 187316 - DNA, 15 bp, Homo sapiens
gggcgggacggagcg

SEQ ID NO: 187317 - DNA, 15 bp, Homo sapiens
ggcgggacggagcgg

SEQ ID NO: 187318 - DNA, 15 bp, Homo sapiens
gcgggacggagcggg

SEQ ID NO: 187319 - DNA, 15 bp, Homo sapiens
cgggacggagcgggg

SEQ ID NO: 187320 - DNA, 15 bp, Homo sapiens
gggacggagcggggc

SEQ ID NO: 187321 - DNA, 15 bp, Homo sapiens
ggacggagcggggcg

SEQ ID NO: 187322 - DNA, 15 bp, Homo sapiens
gacggagcggggcgg

SEQ ID NO: 187323 - DNA, 15 bp, Homo sapiens
acggagcggggcggc

SEQ ID NO: 187324 - DNA, 15 bp, Homo sapiens
cggagcggggcggcc

SEQ ID NO: 187325 - DNA, 15 bp, Homo sapiens
ggagcggggcggcct

SEQ ID NO: 187326 - DNA, 15 bp, Homo sapiens
gagcggggcggcctc

SEQ ID NO: 187327 - DNA, 15 bp, Homo sapiens
agcggggcggcctca

SEQ ID NO: 187328 - DNA, 15 bp, Homo sapiens
gcggggcggcctcag

SEQ ID NO: 187329 - DNA, 15 bp, Homo sapiens
cggggcggcctcagg

SEQ ID NO: 187330 - DNA, 15 bp, Homo sapiens
ggggcggcctcaggg

SEQ ID NO: 187331 - DNA, 15 bp, Homo sapiens
gggcggcctcaggga

SEQ ID NO: 187332 - DNA, 15 bp, Homo sapiens
ggcggcctcagggag

SEQ ID NO: 187333 - DNA, 15 bp, Homo sapiens
gcggcctcagggagc

SEQ ID NO: 187334 - DNA, 15 bp, Homo sapiens
cggcctcagggagcc

SEQ ID NO: 187335 - DNA, 15 bp, Homo sapiens
ggcctcagggagcca

SEQ ID NO: 187336 - DNA, 15 bp, Homo sapiens
gcctcagggagccag

SEQ ID NO: 187337 - DNA, 15 bp, Homo sapiens
cctcagggagccagc

SEQ ID NO: 187338 - DNA, 15 bp, Homo sapiens
ctcagggagccagcc

SEQ ID NO: 187339 - DNA, 15 bp, Homo sapiens
tcagggagccagcca

SEQ ID NO: 187340 - DNA, 15 bp, Homo sapiens
cagggagccagccac

SEQ ID NO: 187341 - DNA, 15 bp, Homo sapiens
agggagccagccact

SEQ ID NO: 187342 - DNA, 15 bp, Homo sapiens
gggagccagccactg

SEQ ID NO: 187343 - DNA, 15 bp, Homo sapiens
ggagccagccactgg

SEQ ID NO: 187344 - DNA, 15 bp, Homo sapiens
gagccagccactggg

SEQ ID NO: 187345 - DNA, 15 bp, Homo sapiens
agccagccactggga

SEQ ID NO: 187346 - DNA, 15 bp, Homo sapiens
gccagccactgggat

SEQ ID NO: 187347 - DNA, 15 bp, Homo sapiens
ccagccactgggatt

SEQ ID NO: 187348 - DNA, 15 bp, Homo sapiens
cagccactgggattg

SEQ ID NO: 187349 - DNA, 15 bp, Homo sapiens
agccactgggattgg

SEQ ID NO: 187350 - DNA, 15 bp, Homo sapiens
gccactgggattggg

SEQ ID NO: 187351 - DNA, 15 bp, Homo sapiens
ccactgggattgggg

SEQ ID NO: 187352 - DNA, 15 bp, Homo sapiens
cactgggattggggt

SEQ ID NO: 187353 - DNA, 15 bp, Homo sapiens
actgggattggggtt

SEQ ID NO: 187354 - DNA, 15 bp, Homo sapiens
ctgggattggggttt

SEQ ID NO: 187355 - DNA, 15 bp, Homo sapiens
tgggattggggtttg

SEQ ID NO: 187356 - DNA, 15 bp, Homo sapiens
gggattggggtttgg

SEQ ID NO: 187357 - DNA, 15 bp, Homo sapiens
ggattggggtttggt

SEQ ID NO: 187358 - DNA, 15 bp, Homo sapiens
gattggggtttggtc

SEQ ID NO: 187359 - DNA, 15 bp, Homo sapiens
attggggtttggtcc

SEQ ID NO: 187360 - DNA, 15 bp, Homo sapiens
ttggggtttggtccc

SEQ ID NO: 187361 - DNA, 15 bp, Homo sapiens
tggggtttggtcccg

SEQ ID NO: 187362 - DNA, 15 bp, Homo sapiens
ggggtttggtcccgg

SEQ ID NO: 187363 - DNA, 15 bp, Homo sapiens
gggtttggtcccggg

SEQ ID NO: 187364 - DNA, 15 bp, Homo sapiens
ggtttggtcccgggt

SEQ ID NO: 187365 - DNA, 15 bp, Homo sapiens
gtttggtcccgggtg

SEQ ID NO: 187366 - DNA, 15 bp, Homo sapiens
tttggtcccgggtgc

SEQ ID NO: 187367 - DNA, 15 bp, Homo sapiens
ttggtcccgggtgca

SEQ ID NO: 187368 - DNA, 15 bp, Homo sapiens
tggtcccgggtgcaa

SEQ ID NO: 187369 - DNA, 15 bp, Homo sapiens
ggtcccgggtgcaag

SEQ ID NO: 187370 - DNA, 15 bp, Homo sapiens
gtcccgggtgcaagt

SEQ ID NO: 187371 - DNA, 15 bp, Homo sapiens
tcccgggtgcaagtg

SEQ ID NO: 187372 - DNA, 15 bp, Homo sapiens
cccgggtgcaagtga

SEQ ID NO: 187373 - DNA, 15 bp, Homo sapiens
ccgggtgcaagtgaa

SEQ ID NO: 187374 - DNA, 15 bp, Homo sapiens
cgggtgcaagtgaag

SEQ ID NO: 187375 - DNA, 15 bp, Homo sapiens
gggtgcaagtgaagc

SEQ ID NO: 187376 - DNA, 15 bp, Homo sapiens
ggtgcaagtgaagcg

SEQ ID NO: 187377 - DNA, 15 bp, Homo sapiens
gtgcaagtgaagcgc

SEQ ID NO: 187378 - DNA, 15 bp, Homo sapiens
tgcaagtgaagcgct

SEQ ID NO: 187379 - DNA, 15 bp, Homo sapiens
gcaagtgaagcgctt

SEQ ID NO: 187380 - DNA, 15 bp, Homo sapiens
caagtgaagcgcttg

SEQ ID NO: 187381 - DNA, 15 bp, Homo sapiens
aagtgaagcgcttgg

SEQ ID NO: 187382 - DNA, 15 bp, Homo sapiens
agtgaagcgcttgga

SEQ ID NO: 187383 - DNA, 15 bp, Homo sapiens
gtgaagcgcttggag

SEQ ID NO: 187384 - DNA, 15 bp, Homo sapiens
tgaagcgcttggagt

SEQ ID NO: 187385 - DNA, 15 bp, Homo sapiens
gaagcgcttggagtt

SEQ ID NO: 187386 - DNA, 15 bp, Homo sapiens
aagcgcttggagttt

SEQ ID NO: 187387 - DNA, 15 bp, Homo sapiens
agcgcttggagtttg

SEQ ID NO: 187388 - DNA, 15 bp, Homo sapiens
gcgcttggagtttgc

SEQ ID NO: 187389 - DNA, 15 bp, Homo sapiens
cgcttggagtttgcg

SEQ ID NO: 187390 - DNA, 15 bp, Homo sapiens
gcttggagtttgcgc

SEQ ID NO: 187391 - DNA, 15 bp, Homo sapiens
cttggagtttgcgcc

SEQ ID NO: 187392 - DNA, 15 bp, Homo sapiens
ttggagtttgcgcct

SEQ ID NO: 187393 - DNA, 15 bp, Homo sapiens
tggagtttgcgcctg

SEQ ID NO: 187394 - DNA, 15 bp, Homo sapiens
ggagtttgcgcctgt

SEQ ID NO: 187395 - DNA, 15 bp, Homo sapiens
gagtttgcgcctgtc

SEQ ID NO: 187396 - DNA, 15 bp, Homo sapiens
agtttgcgcctgtcc

SEQ ID NO: 187397 - DNA, 15 bp, Homo sapiens
gtttgcgcctgtcct

SEQ ID NO: 187398 - DNA, 15 bp, Homo sapiens
tttgcgcctgtcctc

SEQ ID NO: 187399 - DNA, 15 bp, Homo sapiens
ttgcgcctgtcctcc

SEQ ID NO: 187400 - DNA, 15 bp, Homo sapiens
tgcgcctgtcctcct

SEQ ID NO: 187401 - DNA, 15 bp, Homo sapiens
gcgcctgtcctcctt

SEQ ID NO: 187402 - DNA, 15 bp, Homo sapiens
cgcctgtcctccttt

SEQ ID NO: 187403 - DNA, 15 bp, Homo sapiens
gcctgtcctccttta

SEQ ID NO: 187404 - DNA, 15 bp, Homo sapiens
cctgtcctcctttac

SEQ ID NO: 187405 - DNA, 15 bp, Homo sapiens
ctgtcctcctttact

SEQ ID NO: 187406 - DNA, 15 bp, Homo sapiens
tgtcctcctttacta

SEQ ID NO: 187407 - DNA, 15 bp, Homo sapiens
gtcctcctttactaa

SEQ ID NO: 187408 - DNA, 15 bp, Homo sapiens
tcctcctttactaat

SEQ ID NO: 187409 - DNA, 15 bp, Homo sapiens
cctcctttactaatt

SEQ ID NO: 187410 - DNA, 15 bp, Homo sapiens
ctcctttactaattc

SEQ ID NO: 187411 - DNA, 15 bp, Homo sapiens
tcctttactaattca

SEQ ID NO: 187412 - DNA, 15 bp, Homo sapiens
cctttactaattcaa

SEQ ID NO: 187413 - DNA, 15 bp, Homo sapiens
ctttactaattcaaa

SEQ ID NO: 187414 - DNA, 15 bp, Homo sapiens
tttactaattcaaaa

SEQ ID NO: 187415 - DNA, 15 bp, Homo sapiens
ttactaattcaaaaa

SEQ ID NO: 187416 - DNA, 15 bp, Homo sapiens
tactaattcaaaaac

SEQ ID NO: 187417 - DNA, 15 bp, Homo sapiens
actaattcaaaaacc

SEQ ID NO: 187418 - DNA, 15 bp, Homo sapiens
ctaattcaaaaacct

SEQ ID NO: 187419 - DNA, 15 bp, Homo sapiens
taattcaaaaacctc

SEQ ID NO: 187420 - DNA, 15 bp, Homo sapiens
aattcaaaaacctct

SEQ ID NO: 187421 - DNA, 15 bp, Homo sapiens
attcaaaaacctctc

SEQ ID NO: 187422 - DNA, 15 bp, Homo sapiens
ttcaaaaacctctca

SEQ ID NO: 187423 - DNA, 15 bp, Homo sapiens
tcaaaaacctctcaa

SEQ ID NO: 187424 - DNA, 15 bp, Homo sapiens
caaaaacctctcaaa

SEQ ID NO: 187425 - DNA, 15 bp, Homo sapiens
aaaaacctctcaaac

SEQ ID NO: 187426 - DNA, 15 bp, Homo sapiens
aaaacctctcaaaca

SEQ ID NO: 187427 - DNA, 15 bp, Homo sapiens
aaacctctcaaacag

SEQ ID NO: 187428 - DNA, 15 bp, Homo sapiens
aacctctcaaacaga

SEQ ID NO: 187429 - DNA, 15 bp, Homo sapiens
acctctcaaacagac

SEQ ID NO: 187430 - DNA, 15 bp, Homo sapiens
cctctcaaacagaca

SEQ ID NO: 187431 - DNA, 15 bp, Homo sapiens
ctctcaaacagacac

SEQ ID NO: 187432 - DNA, 15 bp, Homo sapiens
tctcaaacagacact

SEQ ID NO: 187433 - DNA, 15 bp, Homo sapiens
ctcaaacagacactt

SEQ ID NO: 187434 - DNA, 15 bp, Homo sapiens
tcaaacagacacttc

SEQ ID NO: 187435 - DNA, 15 bp, Homo sapiens
caaacagacacttcc

SEQ ID NO: 187436 - DNA, 15 bp, Homo sapiens
aaacagacacttccc

SEQ ID NO: 187437 - DNA, 15 bp, Homo sapiens
aacagacacttccct

SEQ ID NO: 187438 - DNA, 15 bp, Homo sapiens
acagacacttccctt

SEQ ID NO: 187439 - DNA, 15 bp, Homo sapiens
cagacacttcccttt

SEQ ID NO: 187440 - DNA, 15 bp, Homo sapiens
agacacttccctttt

SEQ ID NO: 187441 - DNA, 15 bp, Homo sapiens
gacacttcccttttc

SEQ ID NO: 187442 - DNA, 15 bp, Homo sapiens
acacttcccttttct

SEQ ID NO: 187443 - DNA, 15 bp, Homo sapiens
cacttcccttttctt

SEQ ID NO: 187444 - DNA, 15 bp, Homo sapiens
acttcccttttcttc

SEQ ID NO: 187445 - DNA, 15 bp, Homo sapiens
cttcccttttcttct

SEQ ID NO: 187446 - DNA, 15 bp, Homo sapiens
ttcccttttcttctc

SEQ ID NO: 187447 - DNA, 15 bp, Homo sapiens
tcccttttcttctca

SEQ ID NO: 187448 - DNA, 15 bp, Homo sapiens
cccttttcttctcac

SEQ ID NO: 187449 - DNA, 15 bp, Homo sapiens
ccttttcttctcaca

SEQ ID NO: 187450 - DNA, 15 bp, Homo sapiens
cttttcttctcacaa

SEQ ID NO: 187451 - DNA, 15 bp, Homo sapiens
ttttcttctcacaag

SEQ ID NO: 187452 - DNA, 15 bp, Homo sapiens
tttcttctcacaagg

SEQ ID NO: 187453 - DNA, 15 bp, Homo sapiens
ttcttctcacaaggc

SEQ ID NO: 187454 - DNA, 15 bp, Homo sapiens
tcttctcacaaggcc

SEQ ID NO: 187455 - DNA, 15 bp, Homo sapiens
cttctcacaaggcca

SEQ ID NO: 187456 - DNA, 15 bp, Homo sapiens
ttctcacaaggccag

SEQ ID NO: 187457 - DNA, 15 bp, Homo sapiens
tctcacaaggccagt

SEQ ID NO: 187458 - DNA, 15 bp, Homo sapiens
ctcacaaggccagta

SEQ ID NO: 187459 - DNA, 15 bp, Homo sapiens
tcacaaggccagtat

SEQ ID NO: 187460 - DNA, 15 bp, Homo sapiens
cacaaggccagtatc

SEQ ID NO: 187461 - DNA, 15 bp, Homo sapiens
acaaggccagtatcc

SEQ ID NO: 187462 - DNA, 15 bp, Homo sapiens
caaggccagtatccc

SEQ ID NO: 187463 - DNA, 15 bp, Homo sapiens
aaggccagtatcccc

SEQ ID NO: 187464 - DNA, 15 bp, Homo sapiens
aggccagtatccccc

SEQ ID NO: 187465 - DNA, 15 bp, Homo sapiens
ggccagtatccccct

SEQ ID NO: 187466 - DNA, 15 bp, Homo sapiens
gccagtatccccctc

SEQ ID NO: 187467 - DNA, 15 bp, Homo sapiens
ccagtatccccctcc

SEQ ID NO: 187468 - DNA, 15 bp, Homo sapiens
cagtatccccctccc

SEQ ID NO: 187469 - DNA, 15 bp, Homo sapiens
agtatccccctccca

SEQ ID NO: 187470 - DNA, 15 bp, Homo sapiens
gtatccccctcccac

SEQ ID NO: 187471 - DNA, 15 bp, Homo sapiens
tatccccctcccact

SEQ ID NO: 187472 - DNA, 15 bp, Homo sapiens
atccccctcccacta

SEQ ID NO: 187473 - DNA, 15 bp, Homo sapiens
tccccctcccactac

SEQ ID NO: 187474 - DNA, 15 bp, Homo sapiens
ccccctcccactact

SEQ ID NO: 187475 - DNA, 15 bp, Homo sapiens
cccctcccactactc

SEQ ID NO: 187476 - DNA, 15 bp, Homo sapiens
ccctcccactactcc

SEQ ID NO: 187477 - DNA, 15 bp, Homo sapiens
cctcccactactccc

SEQ ID NO: 187478 - DNA, 15 bp, Homo sapiens
ctcccactactccca

SEQ ID NO: 187479 - DNA, 15 bp, Homo sapiens
tcccactactcccat

SEQ ID NO: 187480 - DNA, 15 bp, Homo sapiens
cccactactcccatc

SEQ ID NO: 187481 - DNA, 15 bp, Homo sapiens
ccactactcccatcc

SEQ ID NO: 187482 - DNA, 15 bp, Homo sapiens
cactactcccatccc

SEQ ID NO: 187483 - DNA, 15 bp, Homo sapiens
actactcccatcccg

SEQ ID NO: 187484 - DNA, 15 bp, Homo sapiens
ctactcccatcccgc

SEQ ID NO: 187485 - DNA, 15 bp, Homo sapiens
tactcccatcccgcc

SEQ ID NO: 187486 - DNA, 15 bp, Homo sapiens
actcccatcccgccc

SEQ ID NO: 187487 - DNA, 15 bp, Homo sapiens
ctcccatcccgccca

SEQ ID NO: 187488 - DNA, 15 bp, Homo sapiens
tcccatcccgcccag

SEQ ID NO: 187489 - DNA, 15 bp, Homo sapiens
cccatcccgcccaga

SEQ ID NO: 187490 - DNA, 15 bp, Homo sapiens
ccatcccgcccagaa

SEQ ID NO: 187491 - DNA, 15 bp, Homo sapiens
catcccgcccagaaa

SEQ ID NO: 187492 - DNA, 15 bp, Homo sapiens
atcccgcccagaaac

SEQ ID NO: 187493 - DNA, 15 bp, Homo sapiens
tcccgcccagaaaca

SEQ ID NO: 187494 - DNA, 15 bp, Homo sapiens
cccgcccagaaacag

SEQ ID NO: 187495 - DNA, 15 bp, Homo sapiens
ccgcccagaaacagc

SEQ ID NO: 187496 - DNA, 15 bp, Homo sapiens
cgcccagaaacagcc

SEQ ID NO: 187497 - DNA, 15 bp, Homo sapiens
gcccagaaacagccg

SEQ ID NO: 187498 - DNA, 15 bp, Homo sapiens
cccagaaacagccgc

SEQ ID NO: 187499 - DNA, 15 bp, Homo sapiens
ccagaaacagccgcg

SEQ ID NO: 187500 - DNA, 15 bp, Homo sapiens
cagaaacagccgcgg

SEQ ID NO: 187501 - DNA, 15 bp, Homo sapiens
agaaacagccgcggc

SEQ ID NO: 187502 - DNA, 15 bp, Homo sapiens
cttctcgcagtctct

SEQ ID NO: 187503 - DNA, 15 bp, Homo sapiens
ccgcagctttcatcc

SEQ ID NO: 187504 - DNA, 15 bp, Homo sapiens
accgcagctttcatc

SEQ ID NO: 187505 - DNA, 15 bp, Homo sapiens
caccgcagctttcat

SEQ ID NO: 187506 - DNA, 15 bp, Homo sapiens
gaaatgccgagcctg

SEQ ID NO: 187507 - DNA, 15 bp, Homo sapiens
cttcactcgatccca

SEQ ID NO: 187508 - DNA, 15 bp, Homo sapiens
gtccttcactcgatc

SEQ ID NO: 187509 - DNA, 15 bp, Homo sapiens
ggtccttcactcgat

SEQ ID NO: 187510 - DNA, 15 bp, Homo sapiens
gccgctgtctttgag

SEQ ID NO: 187511 - DNA, 15 bp, Homo sapiens
catagtctctgccgc

SEQ ID NO: 187512 - DNA, 15 bp, Homo sapiens
gcggagccttcaaac

SEQ ID NO: 187513 - DNA, 15 bp, Homo sapiens
aagtcgtccaggtag

SEQ ID NO: 187514 - DNA, 15 bp, Homo sapiens
ctcttgcagctcgtg

SEQ ID NO: 187515 - DNA, 15 bp, Homo sapiens
gtcgcgcatctcctc

SEQ ID NO: 187516 - DNA, 15 bp, Homo sapiens
cagcgcgtccacatg

SEQ ID NO: 187517 - DNA, 15 bp, Homo sapiens
gctcgtcgctgtagg

SEQ ID NO: 187518 - DNA, 15 bp, Homo sapiens
ccgccgttctccttg

SEQ ID NO: 187519 - DNA, 15 bp, Homo sapiens
cttggcgtggtactc

SEQ ID NO: 187520 - DNA, 15 bp, Homo sapiens
cagatgctcggtggc

SEQ ID NO: 187521 - DNA, 15 bp, Homo sapiens
gtgtactcctcgaga

SEQ ID NO: 187522 - DNA, 1299 bp, Homo sapiens
acgcccgggaacccccgacccctctgagcccggggtactgcgcccgggtctccacgcccagagatgctccccggtctccaccgtcgggcaagccccaagcgcagcagcgcagagtcctggggtcaccagagctcgtactaggacatcgtctccccatttaacaccgcctccggtcccatctgagttgcaagtggtggggatgtggggctccggatcaaagtccccgaaaccgagcacttcccgaagcctccttggcctcgaaacaaaacaataacgcccaactccatcatattccagaactcccaccacctgcatacagacattcagctgcacaagccccctccatgctacagtcaacaggatctccaggccacggctcaagcccaggtactcacatcagtggttctatcaacactcaggacagacccatagaagaggcccaagcaggccctggaagtgcatgtggaggccaccaggcaaggaattctggagtcccaggtactcataactctgggtggcatggcccctttgcaccatggactgtttgcccttagaaagggatggatctgagctgggcgcagtggctcatgcctgtaatcccagcactttgggaggccaaggtgggcagctcacctcaggtcaggttggtctcaaactcctgacctcaggcgatccacctcagcctctcaaagtgctggaattataggtgtgagccactgtgcccagcccaaaatcattctttttggaattttgaagcatataattccaaaaggtatgaaggtaatcacttagattgctctaataagggaatgggaacagttaagtcctatacaaataagacaaagataagatactacaaaaaggggatgagcccaagaaaaaaatcaaagtcccagagagagaacagccattgattctaaatacacaagtctatggccccaacccaaacttgtttcactaagaacaacctgtggtttcgagaatctggtcatcccccacagtgaatacatgaacacattgtaatgtttgaaatgtttatttttcttgttgatttcttactgttagaagagctaagtgatttggcccaaagtggctaagtgattcggccagtttgtacacagggatataagtttgctgacaccaagctcatactttacaaatgtaatatcttcataaaacaaaaatactgggccgggcgcggtggctcacgcctgtaatcccagcattttgggaggccgaggcgggcggatcatgagatcaggagatcgagaccatcctggctagcagggtgaagccccg

SEQ ID NO: 187523 - DNA, 917 bp, Mus musculus
caaaatggcgtgctaccctgtccaaccttgtctgtagacagagtcaattgaacactgtctttgggacttccgtgcaactgaggtgggcgggcttgaagcacaaagctttcagggagaaccaaactttatgcccaagctgctctctgccacccacagggtaaatgaatctcatacaggaaaggcaagagacatgtgacactgttgtctgatggtcacaagtcaagctttttaaaaagcagcctgatattgtgagctaacatggctttctgtaattgaatgcaatgtattttctatgcttgtctgggtaaagttgaccttggtttgatttagctcaagcaatatttcaacagtgcactggggctctgagtcccctgactactgtttgactagagccaggctctgccctggatggcaaccaacagcccaggctctggggcacagccgggctttgacaggtctggggaaatgttcaccggagatgaaaggtttcaaactatgaaactctaaaatctcaagtcaaaacttttgacaagcacacacaggacatgaattacaatcacccgaagatttttacaggcttctcaattttaatgacatgctgacacgtgtcatcagatctcacaacaagatgacacatgggtgtcaggtatggcgcagaagactagagtcggggtgtaaccaatgagcattgtctgttggacacaggcgaattcggcaaacggacagtgctggaggcagaagggtttaaagaaggcaggaaagcccatgtttaacagaatggggtgacgaagagggatgggaaggtctaactcacccgggggtgggggcaccaggggggcccacggacacagaaaaccacgcaggtcaggcacctacaaagaccgaaggaaaaagggaccacgcagaaatcactcacg
